(19) United States
(12) Patent Application Publication
(10) Pub. No.: US 2024/0261389 A1
(43) Pub. Date: Aug. 8, 2024

(54) AMINO ACIDS, NUCLEOTIDES AND VECTORS EXPRESSING THE SAME AND USES THEREOF IN PREVENTING SARBECOVIRUS INFECTION

(71) Applicant: National University of Singapore, Singapore (SG)

(72) Inventors: Linfa Wang, Singapore (SG); Wan Ni Chia, Singapore (SG); Chee Wah Tan, Singapore (SG); Feng Zhu, Singapore (SG)

(21) Appl. No.: 18/561,154

(22) PCT Filed: May 15, 2022
(86) PCT No.: PCT/SG2022/050322

§ 371 Date: Nov. 15, 2023

(30) Foreign Application Priority Data
May 15, 2021 (SG) 10202105099S

(51) Int. Cl. A61K 39/215; A61K 39/00; A61P 31/14; C07K 14/005; C12N 7/00; C12N 15/86

(52) U.S. Cl. CPC A61K 39/215; A61P 31/14; C07K 14/005; C12N 7/00; C12N 15/86; A61K 2039/53; A61K 2039/55566; A61K 2039/55572; C12N 2710/24022; C12N 2710/24043; C12N 2750/14122; C12N 2750/14143; C12N 2760/18422; C12N 2760/18443; C12N 2760/20222; C12N 2760/20243; C12N 2770/20034

(57) ABSTRACT

Disclosed herein is a method of making an amino acid construct for the treatment and/or prevention of sarbecovirus infections, comprising: a. comparing amino acid sequences from at least two different sarbecovirus spike proteins or fragments thereof; b. identifying identical amino acids in the sequences from the at least two different sarbecovirus spike proteins or fragments thereof; c. removing any different amino acids from the sequences of the at least two different sarbecovirus spike proteins or fragments thereof to identify a unique amino acid sequence; and d. forming the amino acid construct of the unique amino acid sequence wherein the amino acid construct has at least 90% sequence identity to the at least two different sarbecovirus spike proteins or fragments thereof. Also disclosed are amino acid sequences generated using the method of the invention.

### REFERENCE TO RELATED APPLICATIONS

[0001] This application claims the priority to Singapore patent application No. 10202105099S, filed 15 May 2021, the contents of which are incorporated herein by reference.

### TECHNICAL FIELD

[0002] The present invention generally relates to proteins and their use in the treatment and/or prevention of Severe Acute Respiratory Syndrome (SARS)-related coronavirus infections, particularly sarbecovirus infections.

### BACKGROUND

[0003] The following discussion of the background to the invention is intended to facilitate an understanding of the present invention only. It should be appreciated that the discussion is not an acknowledgement or admission that any of the material referred to was published, known or part of the common general knowledge of the person skilled in the art in any jurisdiction as at the priority date of the invention.

[0004] Since 2002, we had three major human infectious diseases caused by coronaviruses (CoVs), SARS coronavirus (SARS-CoV) in 2002-2003 (Peiris et al. Nat Med 2004, 10:S88-97), Middle East Respiratory Syndrome coronavirus (MERS-CoV) since 2012 (Zaki et al. N Engl J Med 2012, 367:1814-1820) and the ongoing COVID-19 or SARS coronavirus 2 (SARS-CoV-2) (Wang et al. Lancet 2020, 395:470-473). All of these diseases have caused devastating economic and human losses globally. For SARS-CoV and MERS-CoV, we still don't have a licensed vaccine to protect us from future infections. For SARS-CoV-2, the unprecedented speed of vaccine development has resulted in many licensed vaccines for human use (Fauci, Science 2021, 372:109).

[0005] However, the recent emergence of SARS-CoV-2 variants such as the SARS-CoV-2 B.1.1.7/201/501Y.V1 detected in the UK; the South African SARS-CoV-2 B.1.351/20H/501Y.V2, the Brazil SARS-CoV-2 P.1/20J/501Y.V3/B.1.1.248, and the U.S. SARS-CoV-2 B.1.1427/B.1.429 (Mascola et al. JAMA 2021, 325:1261-1262; Zhang et al. JAMA 2021, 325(13):1324-1326) and the observed reduction of immune protection against new variants from vaccines based on the original virus strain raised a new challenge on the need for a broad-spectrum protection against all known and future SARS-CoV-2 variants.

[0006] Furthermore, there are many more coronaviruses circulating in wildlife reservoirs such as the SC2r-CoV RaTG13 in bats and the SC2r-CoV GX-P5L in pangolins (Wang et al. Curr Opin Virol 2019, 34:79-89; Zhou et al. Nature 2020, 579:270-273; Lam et al. Nature 2020, 583:282-285).

[0007] In addition, there is a high chance of future outbreaks (SARS3, SARS4, etc.) caused by different but related coronaviruses (Calistri et al. Microorganisms 2021, 9).

[0008] The current classification of coronaviruses is shown in FIG. 1. Four genera, alpha, beta, delta and gamma have been identified. The most transmissible coronaviruses for human infections are from the sarbecoviruses group. It was also found that all sarbecoviruses use the angiotensin-converting enzyme 2 (ACE2) as an entry receptor to human host cells.

[0009] Accordingly, there exists a need for prophylactic or therapeutic vaccine for the treatment and/or prevention of current and any future infections caused by sarbecoviruses.

### SUMMARY

[0010] Amino acid constructs, nucleotides, vectors and immunogenic composition containing or expressing the amino acid sequences used in preventing and/or treating a sarbecovirus infection are envisioned.

[0011] According to an aspect of the present disclosure, there is provided an amino acid construct comprising any one of amino acid sequences selected from the group comprising SEQ ID Nos. 10 to 22 164 and 165, the amino acid construct having at least 90% sequence identity to at least two different sarbecovirus Spike proteins, or a fragment thereof.

[0012] According to another aspect there is a nucleic acid encoding the amino acid construct as described herein above.

[0013] According to another aspect there is an immunogenic composition comprising the amino acid construct as described herein above or the nucleic acid as described herein above.

[0014] According to another aspect there is a viral vector comprising the nucleic acid as described herein above.

[0015] According to another aspect there is an amino acid construct as described herein above, a nucleic acid as described herein above, an immunogenic composition as described herein above, a viral vector as described herein above or vaccine formulations suitable for use in the treatment or prevention of sarbecovirus infections.

[0016] According to another aspect there is a use of an amino acid construct as described herein above, a nucleic acid as described herein above, an immunogenic composition as described herein above, a viral vector as described herein above in the manufacture of a medicament for the treatment or prevention of sarbecovirus infections.

[0017] According to another aspect there is a method for treating and/or preventing an infection caused by sarbecoviruses comprising administering a vaccine molecule comprising an amino acid construct as described herein above, a nucleic acid as described herein above, an immunogenic composition as described herein above, or a viral vector as described herein above to a subject.

[0018] According to another aspect there is method of making an amino acid construct as described herein above, comprising: a) comparing amino acid sequences from at least two different sarbecovirus spike proteins or a fragment thereof; b) identifying identical amino acid in the sequences from the at least two different sarbecovirus spike proteins or fragments thereof; c) removing any different amino acids from the sequences of the at least two different sarbecovirus spike proteins or fragments thereof to identify a unique amino acid sequence; and d) forming the amino construct of the unique amino acid sequence wherein the amino construct has at least 90% sequence identity to the at least two different sarbecovirus Spike proteins, or a fragment thereof.

[0019] Other aspects and features will become apparent to those of ordinary skill in the art upon review of the following description of specific embodiments in conjunction with the accompanying figures.

### BRIEF DESCRIPTION OF THE DRAWINGS

[0020] In the figures, which illustrate, by way of example only, embodiments of the present invention,

[0021] FIG. 1 illustrates the family tree of four known coronavirus genera;

[0022] FIG. 2 illustrates the consensus groups established taking into consideration of phylogenetic relationship and ACE2 receptor usages;

[0023] FIG. 3 illustrates the design method to generate amino acid consensus sequences;

[0024] FIG. 4 illustrates a surrogate virus neutralization test (sVNT) which allowed a rapid and multiplex determination of Nabs;

[0025] FIG. 5 illustrates a A) multiplex sVNT on the Luminex platform B) showing that six RBD proteins are able to bind the hACE2 receptor molecule in the following order (from high to low affinity): SARS-CoV-2 B.1.351>SARS-CoV-2 B.1.1.7=SC2r-CoV GX-P5L (pangolin)>SARS-CoV-2>SARS-CoV>SC2r-CoV RaTG13 (bat);

[0026] FIG. 6 illustrates a multiplex sVNT on six different RBDs (from left to right: SARS-CoV-2 WT, B.1.1.7, B.1.351; Bat virus RaTG13; Pangolin virus GX-P5L; SARS-CoV). A) SARS patient (N=11); B) COVID-19 patient (N=40); C) Healthy-vaccinated (N=20). Serum samples were taken two weeks after second dose; D) SARS-vaccinated (N=9). Sera from SARS survivors taken 21-62 days after the first vaccination. All serum samples were tested at a single dilution of 1:20. A cut-off of 30% was set as previously determined.

[0027] FIG. 7 illustrates a titration of neutralizing antibody levels (NT50) in different groups against six sarbecoviruses. Serum samples were tested at dilutions from 1:20 to 1:20480 by a 4-fold serial titration.

[0028] FIG. 8 illustrates a confirmation of boosting pan-sarbecovirus cross-neutralizing antibodies in the SARS-vaccinated group. FIG. 8A shows the pan-sarbecovirus neutralization of mAb 5B7D7 against SARS-CoV-2 variants of concern, bat SC2r-CoV RaTG13, Pangolin SC2r-CoV GX-P5L and SARS-CoV measured by the multiplex sVNT. FIG. 8B illustrates an inhibition of 5B7D7 binding to different RBDs by the four different panels of sera.

[0029] FIG. 9 illustrates neutralization patterns from rabbit hyper immune sera targeting different beta coronavirus RBD proteins.

[0030] FIG. 10 illustrates challenge with 20 RBD of different sarbecovirus after vaccination with either 2 doses of 25 μg protein (SEQ ID No. 165, a modified version of SEQ ID No. 13 with foldon and linker sequence) and sigma adjuvant or one dose of 25 μg protein (SEQ ID No. 165) and sigma adjuvant followed by one dose of Sinovac vaccine.

[0031] FIG. 11 illustrates challenge with 20 RBD of different sarbecovirus after vaccination with either 2 doses of 25 μg protein (SEQ ID No. 165, a modified version of SEQ ID No. 13 with foldon and linker sequence) and sigma adjuvant or one dose of 25 μg protein (SEQ ID No. 165, a modified version of SEQ ID No. 13 with foldon and linker sequence) and sigma adjuvant followed by one dose of Sinovac vaccine.

[0032] FIG. 12 illustrates Separate dosage regimens were compared: the first being 3 doses of the Pfizer BioNTech vaccine; the second being 2 doses of the Pfizer BioNTech vaccine followed by a dose of 25 μg of the protein listed in SEQ ID No. 165 (a modified version of SEQ ID No. 13 with foldon and linker sequence) administered with Sigma adjuvant; the third being 2 doses of the Pfizer BioNTech vaccine followed by a dose of 1 μg of the protein listed in SEQ ID No. 165, a modified version of SEQ ID No. 13 with foldon and linker sequence; the fourth being 2 doses of the Pfizer BioNTech vaccine followed by a dose of saline; and the final being 3 doses of saline.

[0033] FIG. 13 illustrates Separate dosage regimens were compared: the first being 3 doses of the Moderna vaccine; the second being 2 doses of the Moderna vaccine followed by a dose of 25 μg of the protein listed in SEQ ID No. 165 (a modified version of SEQ ID No. 13 with foldon and linker sequence) administered with Sigma adjuvant; the third being 2 doses of the Moderna vaccine followed by a dose of 1 μg of the protein listed in SEQ ID No. 165 (a modified version of SEQ ID No. 13 with foldon and linker sequence); the fourth being 2 doses of the Moderna vaccine followed by a dose of saline; and the final being 3 doses of saline.

[0034] FIG. 14 illustrates Separate dosage regimens were compared: the first being 3 doses of the Sinovac vaccine; the second being 2 doses of the Sinovac vaccine followed by a dose of 25 μg of the protein listed in SEQ ID No. 164 (a modified version of SEQ ID No. 1 with foldon and linker sequence) administered with Sigma adjuvant; the third being 2 doses of the Sinovac vaccine followed by a dose of 25 μg of the protein listed in SEQ ID No. 165 (a modified version of SEQ ID No. 13 with foldon and linker sequence) administered with Sigma adjuvant; the fourth being 2 doses of the Sinovac vaccine followed by a dose of 1 μg of the protein listed in SEQ ID No. 165 (a modified version of SEQ ID No. 13 with foldon and linker sequence); and the final being 3 doses of saline.

### DETAILED DESCRIPTION

[0035] The present disclosure provides proteins comprising an amino acid sequence from sarbecovirus Spike proteins. Such polypeptides are exemplified below.

[0036] Throughout this document, unless otherwise indicated to the contrary, the terms “comprising”, “consisting of”, “having” and the like, are to be construed as non-exhaustive, or in other words, as meaning “including, but not limited to”.

[0037] Furthermore, throughout the specification, unless the context requires otherwise, the word “include” or variations such as “includes” or “including” will be understood to imply the inclusion of a stated integer or group of integers but not the exclusion of any other integer or group of integers.

[0038] Unless defined otherwise, all technical and scientific terms used herein have the same meaning as is commonly understood by a skilled person to which the subject matter herein belongs.

[0039] According to various embodiments there is an amino acid construct comprising any one of the amino acid sequence selected from the group comprising SEQ ID Nos. 10 to 22, 164 and 165, the amino acid construct having at least 90% sequence identity to at least two different sarbecovirus Spike proteins, or a fragment thereof.

[0040] Throughout the description, it is to be appreciated that the term ‘Sarbecovirus’ and its plural form include any beta coronavirus that uses angiotensin converting enzyme 2 (ACE2) receptor as entry into cells. In various embodiments, the sarbecovirus comprises any beta coronavirus that uses ACE2 receptor as entry into cells. In various embodiments, the sarbecovirus comprises any beta coronavirus that uses human ACE2 receptor as entry into human cells. In various embodiments, the sarbecovirus comprises any known or new sarbecovirus. In various embodiments, the sarbecovirus is selected from the group comprising or consisting of SARS-CoV, SARS-CoV-2, SARS-CoV-2 B.1.1.7, SARS-CoV-2 B.1.351, SC2r-CoV RaTG13, and SC2r-CoV GX-P5L.

[0041] In various embodiments, the amino acid construct comprises a sequence designed to have consensus with two or more different sarbecovirus Spike protein sequences, or fragments thereof. Whereby two or more different sarbecovirus Spike protein sequences, or fragments thereof are aligned, and all identical amino acids are retained, and the first variation is arbitrarily selected from at least one of the sarbecovirus Spike protein sequences, or fragments thereof and the subsequent variation is selected from a different sarbecovirus Spike protein sequences, or fragments thereof. The resulting consensus sequence is therefore, similar to and has consensus with the two or more different from sarbecovirus Spike protein sequences, or fragments thereof from which it is derived but it varies from each of these. In various embodiments the construct may be modified with foldon and linker sequence. The advantage is that when such an amino acid construct is used as an immunogenic composition it results in antibodies able to neutralise several different sarbecovirus infections i.e., the protein can be used as a pan-sarbecovirus vaccine.

[0042] In various embodiments, the sarbecovirus Spike protein refers to a wild type spike protein identified or isolated from any of sarbecovirus as listed above and a fragment thereof refers to a wild type sarbecovirus receptor binding domain (RBD) of the spike protein that binds to the ACE2 receptor. In various embodiments, the sarbecovirus Spike protein comprises a SARS-CoV spike protein having an amino acid sequence set forth in SEQ ID NO:1. In various embodiments, the sarbecovirus Spike protein comprises a SARS-CoV2 spike protein having an amino acid sequence set forth in SEQ ID NO:2. In various embodiments, the sarbecovirus Spike protein comprises any one of the proteins having an amino acid sequence set forth in SEQ ID NOs: 23-163. In various embodiments, the fragment of the spike protein comprises a SARS-CoV, RBD having an amino acid sequence set forth in SEQ ID NO:4. In various embodiments, the fragment of the spike protein comprises a SARS-CoV2, RBD having an amino acid sequence set forth in SEQ ID NO:7. In various embodiments, the fragment of the spike protein comprises an amino acid sequence set forth in SEQ ID NO:3 or SEQ ID NO: 5. In various embodiments, the amino acid construct has at least 75%, including one of 75%, 80%, 85%, 90%, 91%, 92%, 93%, 94%, 95%, 96%, 97%, 98%, or even 99.9% sequence identity to at least two different sarbecovirus Spike proteins, or a fragment thereof. In various embodiments, the amino acid construct has at least 75%, including one of 75%, 80%, 85%, 90%, 91%, 92%, 93%, 94%, 95%, 96%, 97%, 98%, or even 99.9% sequence identity to both a wild type of a spike protein or a fragment thereof of a first sarbecovirus and a spike protein or a fragment thereof of a second sarbecovirus. In various embodiments, the first sarbecovirus may comprise SARS-CoV and the second sarbecovirus may comprise SC1 r-CoV. In various embodiments, the first sarbecovirus may comprise SARS-CoV and the second sarbecovirus may comprise SARS-CoV-2 B.1.1.7. In various embodiments, the first sarbecovirus may comprise SARS-CoV and the second sarbecovirus may comprise SARS-CoV-2 B.1.351. In various embodiments, the first sarbecovirus may comprise SARS-CoV-2 and the second sarbecovirus may comprise SC2r-CoV. In various embodiments, the first sarbecovirus may comprise SARS-CoV-2 and the second sarbecovirus may comprise SC2r-CoV. In various embodiments, the first sarbecovirus may be selected from any one of SARS-CoV-2, Brazil SARS-CoV-2 variant P.1 also known as 20J/501Y.V3/B.1.1.248, UK SARS-CoV-2 variant B.1.1.7, South African SARS-CoV-2 variant B.1.351 also known as 20H/501Y.V2, or 501Y.V2 variant, Indian SARS-CoV-2 variant B1.617, SC2r-CoV RaTG13, and SC2r-CoV GX-P5L and the second sarbecovirus may be selected from any one of SARS-CoV, SARS-CoV-2, SARS-CoV-2 B.1.1.7, SARS-CoV-2 B.1.351, SARS-CoV-2 B1.617, SC2r-CoV RaTG13, and SC2r-CoV GX-P5L provided it is different from the first sarbecovirus.

[0043] Throughout the description, it is to be appreciated that the term ‘isolated’ include those purified by standard purification methods. It does not require absolute purity and can include protein, peptide, nucleic acid or vaccine molecules that are at least 80%, 85%, 90%, 95%, 98%, or 99% isolated.

[0044] In various embodiments, the at least two different sarbecovirus Spike proteins or fragment comprises an amino acid sequence having at least 90%, including one of 90%, 91%, 92%, 93%, 94%, 95%, 96%, 97%, 98%, or even 99.9% sequence identity to the at least two sarbecovirus Spike protein, and an amino acid sequence having at least 90%, including one of 90%, 91%, 92%, 93%, 94%, 95%, 96%, 97%, 98%, or even 99.9% sequence identity to two or more different sarbecovirus Spike proteins or fragment thereof. In various embodiments, the at least two different sarbecovirus Spike proteins or fragment comprise a sarbecovirus Spike protein and a fragment of a different sarbecovirus Spike protein.

[0045] In various embodiments, the fragment comprises a receptor binding domain fragment of a sarbecovirus Spike protein.

[0046] In various embodiments, the amino acid sequence comprises or consists of any one of sequence selected from SEQ ID NOs: 10 to 22 or 165 or any combination thereof. In various embodiments, the amino acid sequence comprises or consists a construct designed to have at least 75% sequence identity with at least two of any one of sequence selected from SEQ ID NOs: 1 to 9 or 23 to 163.

[0047] In various embodiments, the amino acid construct comprises a consensus sequence set forth in SEQ ID NO: 10.

[0048] In various embodiments, the amino acid construct comprises a consensus sequence set forth in SEQ ID NO: 11.

[0049] In various embodiments, the amino acid construct comprises a consensus sequence set forth in SEQ ID NO: 12.

[0050] In various embodiments, the amino acid construct comprises a consensus sequence set forth in SEQ ID NO: 13.

[0051] In various embodiments, the amino acid construct comprises a consensus sequence set forth in SEQ ID NO: 14.

[0052] In various embodiments, the amino acid construct comprises a consensus sequence set forth in SEQ ID NO: 15.

[0053] In various embodiments, the amino acid construct comprises a consensus sequence set forth in SEQ ID NO: 16.

[0054] In various embodiments, the amino acid construct comprises a consensus sequence set forth in SEQ ID NO: 17.

[0055] In various embodiments, the amino acid construct comprises a consensus sequence set forth in SEQ ID NO: 18.

[0056] In various embodiments, the amino acid construct comprises a consensus sequence set forth in SEQ ID NO: 19.

[0057] In various embodiments, the amino acid construct comprises a consensus sequence set forth in SEQ ID NO: 20.

[0058] In various embodiments, the amino acid construct comprises a consensus sequence set forth in SEQ ID NO: 21.

[0059] In various embodiments, the amino acid construct comprises a consensus sequence set forth in SEQ ID NO: 22.

[0060] In various embodiments, the amino acid construct comprises a foldon and a linker sequence. In various embodiments, the amino acid construct comprising a foldon and a linker sequence comprises consensus sequence set forth in SEQ ID NO: 164 or SEQ ID NO: 165.

[0061] In various embodiments, the amino acid construct comprises an oligomeric polypeptide. In various embodiments, the oligomeric polypeptide comprises a hetero-oligomer.

[0062] In various embodiments, the polypeptide is a fusion dimer.

[0063] According to various embodiments there is a nucleic acid encoding the amino acid construct as described herein above.

[0064] In various embodiments, the nucleic acid comprises a messenger ribonucleic acid (mRNA).

[0065] In various embodiments, the nucleic acid is a RNA. The term ‘RNA’ includes a ribonucleic acid (RNA) polynucleotide having an open reading frame encoding a polypeptide of the amino acid construct capable of inducing an immune response against one or more sarbecovirus infections. In various embodiment, it includes at least one ribonucleic acid (RNA) polynucleotide having an open reading frame that encodes amino acid construct that can elicit an immune response against two or more different sarbecovirus infections wherein the amino acid constructs are as described herein above.

[0066] According to various embodiments there is an immunogenic composition comprising amino acid construct as described herein above or the nucleic acid as described herein above.

[0067] In various embodiments, the immunogenic composition includes a recombinant sarbecovirus spike ectodomain trimer that elicits or induces a measurable response against the sarbecovirus when administered to a subject. For in vivo use, the immunogenic composition will typically include the recombinant coronavirus spike ectodomain trimer or a nucleic acid molecule encoding a protomer of the recombinant coronavirus spike ectodomain trimer in a pharmaceutically acceptable carrier and may also include other agents, such as an adjuvant.

[0068] In various embodiments, the adjuvant includes MF59, Adjuvant System 03 (A S03), CpG 1018 or Sigma Adjuvant System (S6322).

[0069] In various embodiments, the immunogenic composition comprises at least two amino acid constructs capable of eliciting or inducing a measurable response against the sarbecovirus when administered to a subject. In various embodiments the subject or individual is an animal, such as a mammal such as a human at risk of coming into contact with a sarbecovirus infection.

[0070] In various embodiments, the immunogenic composition is an RNA vaccine. The term ‘RNA vaccine’ includes a vaccine having a ribonucleic acid (RNA) polynucleotide having an open reading frame encoding the amino acid construct capable of inducing an immune response against sarbecovirus infections. In various embodiments, the immunogenic composition includes at least one ribonucleic acid (RNA) polynucleotide having an open reading frame that encodes two or more the amino acid constructs that can elicit an immune response against sarbecovirus infections.

[0071] In various embodiments, the immunogenic composition comprises the amino acid construct as described herein above, or the nucleic acid as described herein above enclosed in a lipid nanoparticles. In various embodiments, the immunogenic composition is a mRNA vaccine comprising lipid nanoparticles. In various embodiments, the immunogenic composition comprises a pre-fusion stabilized spike-RBD-adjuvant trimer.

[0072] In various embodiments, the amino acid construct having at least 75% sequence identity to sarbecovirus RBD fragment comprises a recombinant RBD (rRBD). In various embodiments, the immunogenic composition comprises two dimeric formats selected from tandem dimer and rRBD-Fc fusion dimer.

[0073] In various embodiments, the immunogenic composition comprises a carrier. In various embodiments, the carrier is any one of a lipid nanoparticle (LNP), a polymeric nanoparticle, a lipid carrier such as a lipidoid, a liposome, a lipoplex, a peptide carrier, a nanoparticle mimic, a nanotube, or a conjugate.

[0074] According to various embodiments there is a viral vector comprising a nucleic acid as described herein above.

[0075] In various embodiments, the vector is selected from a recombinant measles virus vector, a vesicular stomatitis virus (VSV) vector, a vaccinia virus vector or an adenovirus vector.

[0076] According to various embodiments there is an amino acid construct as described herein above for use in the treatment or prevention of sarbecovirus infections.

[0077] According to various embodiments there is an immunogenic composition as described herein above for use in the treatment and/or prevention of sarbecovirus infections.

[0078] According to various embodiments there is use of an amino acid construct as described herein above in the manufacture of a medicament for the treatment and/or prevention of sarbecovirus infections.

[0079] According to various embodiments there is use of an immunogenic composition as described herein above in the manufacture of a medicament for the treatment and/or prevention of sarbecovirus infections.

[0080] According to various embodiments there is use of a method of treating and/or preventing an infection caused by sarbecovirus comprising administering a vaccine molecule comprising an amino acid construct as described herein above, an immunogenic composition as described herein above, or a viral vector as described herein above to a subject.

[0081] In various embodiments, a method for inducing an immune response to a mammalian subject comprises administering a therapeutically effective amount of the immunogenic composition as described herein above, to the mammalian subject.

[0082] According to various embodiments, there is a method of making an amino acid construct as described herein above, the method comprising: a) comparing amino acid sequences from at least two different sarbecovirus spike proteins or fragments thereof; b) identifying identical amino acid in the sequences from the at least two different sarbecovirus spike proteins or fragments thereof; c) removing any different amino acids from the sequences of the at least two different sarbecovirus spike proteins or fragments thereof to identify a unique amino acid sequence; and d) forming the amino construct of unique amino acid sequence wherein the amino construct has at least 75% sequence identity to the at least two different sarbecovirus Spike protein, or a fragment thereof.

[0083] In various embodiments, the method of making an amino acid construct further comprising modifying the unique amino acid sequence with a foldon and a linker sequence. The C-terminal domain of T4 fibritin (foldon) is known for the formation of the fibritin trimer structure and can be used as an artificial trimerization domain. In various embodiments the linker comprises a His6-tag.

[0084] In various embodiments, the at least two different sarbecovirus spike proteins or fragments thereof comprise any one of 2, 5, 10, 20, 30, 40, 50, 60, 70, 80, 90, 100, 110, 120, 130, 140, 150, 160, and 170 different sarbecovirus spike proteins or fragments thereof. In various embodiments the at least two different sarbecovirus spike proteins or fragments thereof comprise a plurality of sarbecovirus spike proteins or fragments thereof. In various embodiments, the plurality of sarbecovirus spike proteins or fragments thereof comprise 50-100, 80-150, 100-200 different sarbecovirus spike proteins or fragments thereof. In various embodiments step a) comprises comparing amino acid sequences from a plurality of different sarbecovirus spike proteins or fragments thereof, and step b) comprises identifying amino acid sequences from the plurality of different sarbecovirus spike proteins or fragments thereof above a predetermined sequence identity to the majority of the plurality of different sarbecovirus spike proteins or fragments thereof and step c) comprises removing any amino acids sequences from the plurality of different sarbecovirus spike proteins or fragments thereof below a predetermined sequence identity to the majority of the plurality of different sarbecovirus spike proteins or fragments thereof. In various embodiments the predetermined sequence identity is 85% or 90% or 95%, or 96% or 97%, or 98% or 99%.

[0085] In various embodiments, the method further comprising identifying a fragment within the unique amino acid sequence that corresponds to a receptor binding domain of the at least two different sarbecovirus spike proteins to form a unique amino acid fragment sequence; and forming the amino construct of the combined the unique amino acid fragment sequence with the unique amino acid sequence.

[0086] In various embodiments, forming the amino construct in step d) comprises forming a nucleic acid encoding the amino acid construct, able to express the amino acid construct.

[0087] In various embodiments, the nucleic acid comprises a messenger ribonucleic acid (mRNA).

[0088] In various embodiments, the amino acid construct or a nucleic acid encoding the amino acid construct able to express the amino acid construct is prepared as an immunogenic composition.

[0089] In various embodiments, the immunogenic composition comprises an adjuvant.

[0090] In various embodiments, the nucleic acid is prepared in a viral vector.

[0091] In various embodiments, the vector is selected from a recombinant measles virus vector, a vesicular stomatitis virus (VSV) vector, a vaccinia virus vector or an adenovirus vector.

[0092] Throughout the description, it is to be appreciated that the term ‘polypeptide’, used interchangeably with protein or peptide, includes amino acid polymers including naturally occurring amino acid polymers and non-naturally occurring amino acid polymers. A polypeptide has an amino terminal (N-terminal) end and a carboxy terminal (C-terminal) end.

[0093] In various embodiments the amino acid construct comprises a consensus amino acid sequence as set forth in SEQ ID NO: 10; SEQ ID NO: 11; SEQ ID NO: 12; SEQ ID NO: 13; SEQ ID NO: 14; SEQ ID NO: 15; SEQ ID NO: 16; SEQ ID NO: 17, SEQ ID NO: 18; SEQ ID NO: 19; SEQ ID NO: 20; SEQ ID NO: 21; SEQ ID NO: 22 SEQ ID NO: 164 or SEQ ID NO: 165.

[0094] In various embodiments, the amino acid construct having at least 75% sequence identity to a sarbecovirus spike protein, comprises amino acid sequence as set forth in SEQ ID NO:1; SEQ ID NO: 10; SEQ ID NO: 11; SEQ ID NO: 12; SEQ ID NO: 13; SEQ ID NO: 14; SEQ ID NO: 15; SEQ ID NO: 16; SEQ ID NO: 17; SEQ ID NO: 164; SEQ ID NO: 165.

[0095] In various embodiments, there is the amino acid construct having at least 75% sequence identity to a sarbecovirus receptor binding domain (RBD) protein comprises a consensus amino acid sequence as set forth in SEQ ID NO: 4; SEQ ID NO: 18; SEQ ID NO: 19; SEQ ID NO: 20; SEQ ID NO: 21; SEQ ID NO: 22; SEQ ID NO: 164; or SEQ ID NO: 165.

[0096] In various embodiments, the amino acid construct having at least 75% sequence identity to a sarbecovirus spike protein may have a minimum length of one of 25, 50, 100, 200, 300, 400, 500, 600, 700, 800, 900, 1,000, 1,100 or 1,200 amino acids, and may have a maximum length of one of 50, 100, 200, 300, 400, 500, 600, 700, 800, 900, 1,000, 1,100 or 1,200 amino acids.

[0097] In various embodiments, the amino acid construct having at least 75% sequence identity to a sarbecovirus receptor binding domain (RBD) protein may have a minimum length of one of 10, 20, 30, 40, 50, 100, 150, 200 amino acids, and may have a maximum length of one of 20, 10, 20, 30, 40, 50, 100, 150, 200 amino acids.

### EXAMPLES

### Sequences

| SEQ | | |
|---|---|---|
| ID | | |
| NO: | DESCRIPTION | AMINO ACID SEQUENCE |
| 1 | SARS-CoV | MFIFLLFLTLTSGSDLDRCTTFDDVQAPNYTQHTSSMRGVYYP |
| | spike protein | DEIFRSDTLYLTQDLFLPFYSNVTGFHTINHTFDNPVIPFKDGIY |
| | | FAATEKSNVVRGWVFGSTMNNKSQSVIIINNSTNVVIRACNFE |
| | | LCDNPFFAVSKPMGTQTHTMIFDNAFNCTFEYISDAFSLDVSE |
| | | KSGNFKHLREFVFKNKDGFLYVYKGYQPIDVVRDLPSGFNTLK |
| | | PIFKLPLGINITNFRAILTAFSPAQDTWGTSAAAYFVGYLKPTTF |
| | | MLKYDENGTITDAVDCSQNPLAELKCSVKSFEIDKGIYQTSNF |
| | | RVVPSGDVVRFPNITNLCPFGEVFNATKFPSVYAWERKKISNC |
| | | VADYSVLYNSTFFSTFKCYGVSATKLNDLCFSNVYADSFVVKG |
| | | DDVRQIAPGQTGVIADYNYKLPDDFMGCVLAWNTRNIDATST |
| | | GNYNYKYRYLRHGKLRPFERDISNVPFSPDGKPCTPPALNCY |
| | | WPLNDYGFYTTTGIGYQPYRVVVLSFELLNAPATVCGPKLSTD |
| | | LIKNQCVNFNFNGLTGTGVLTPSSKRFQPFQQFGRDVSDFTD |
| | | SVRDPKTSEILDISPCSFGGVSVITPGTNASSEVAVLYQDVNCT |
| | | DVSTAIHADQLTPAWRIYSTGNNVFQTQAGCLIGAEHVDTSYE |
| | | CDIPIGAGICASYHTVSLLRSTSQKSIVAYTMSLGADSSIAYSNN |
| | | TIAIPTNFSISITTEVMPVSMAKTSVDCNMYICGDSTECANLLLQ |
| | | YGSFCTQLNRALSGIAAEQDRNTREVFAQVKQMYKTPTLKYF |
| | | GGFNFSQILPDPLKPTKRSFIEDLLFNKVTLADAGFMKQYGEC |
| | | LGDINARDLICAQKFNGLTVLPPLLTDDMIAAYTAALVSGTATA |
| | | GWTFGAGAALQIPFAMQMAYRFNGIGVTQNVLYENQKQIANQ |
| | | FNKAISQIQESLTTTSTALGKLQDVVNQNAQALNTLVKQLSSNF |
| | | GAISSVLNDILSRLDKVEAEVQIDRLITGRLQSLQTYVTQQLIRA |
| | | AEIRASANLAATKMSECVLGQSKRVDFCGKGYHLMSFPQAAP |
| | | HGVVFLHVTYVPSQERNFTTAPAICHEGKAYFPREGVFVFNG |
| | | TSWFITQRNFFSPQIITTDNTFVSGNCDVVIGIINNTVYDPLQPE |
| | | LDSFKEELDKYFKNHTSPDVDLGDISGINASVVNIQKEIDRLNE |
| | | VAKNLNESLIDLQELGKYEQYIKWPWYVWLGFIAGLIAIVMVTIL |
| | | LCCMTSCCSCLKGACSCGSCCKFDEDDSEPVLKGVKLHYT |
| 2 | SARS-CoV-2 | MFLLTTKRTMFVFLVLLPLVSSQCVNLTTRTQLPPAYTNSFTR |
| | spike protein | GVYYPDKVFRSSVLHSTQDLFLPFFSNVTWFHAIHVSGTNGTK |
| | | RFDNPVLPFNDGVYFASTEKSNIIRGWIFGTTLDSKTQSLLIVN |
| | | NATNVVIKVCEFQFCNDPFLGVYYHKNNKSWMESEFRVYSSA |
| | | NNCTFEYVSQPFLMDLEGKQGNFKNLREFVFKNIDGYFKIYSK |
| | | HTPINLVRDLPQGFSALEPLVDLPIGINITRFQTLLALHRSYLTP |
| | | GDSSSGWTAGAAAYYVGYLQPRTFLLKYNENGTITDAVDCAL |
| | | DPLSETKCTLKSFTVEKGIYQTSNFRVQPTESIVRFPNITNLCP |
| | | FGEVFNATRFASVYAWNRKRISNCVADYSVLYNSASFSTFKC |
| | | YGVSPTKLNDLCFTNVYADSFVIRGDEVRQIAPGQTGKIADYN |
| | | YKLPDDFTGCVIAWNSNNLDSKVGGNYNYLYRLFRKSNLKPF |
| | | ERDISTEIYQAGSTPCNGVEGFNCYFPLQSYGFQPTNGVGYQ |
| | | PYRVVVLSFELLHAPATVCGPKKSTNLVKNKCVNFNFNGLTGT |
| | | GVLTESNKKFLPFQQFGRDIADTTDAVRDPQTLEILDITPCSFG |
| | | GVSVITPGTNTSNQVAVLYQDVNCTEVPVAIHADQLTPTWRVY |
| | | STGSNVFQTRAGCLIGAEHVNNSYECDIPIGAGICASYQTQTN |
| | | SPRRARSVASQSIIAYTMSLGAENSVAYSNNSIAIPTNFTISVTT |
| | | EILPVSMTKTSVDCTMYICGDSTECSNLLLQYGSFCTQLNRAL |
| | | TGIAVEQDKNTQEVFAQVKQIYKTPPIKDFGGFNFSQILPDPSK |
| | | PSKRSFIEDLLFNKVTLADAGFIKQYGDCLGDIAARDLICAQKF |
| | | NGLTVLPPLLTDEMIAQYTSALLAGTITSGWTFGAGAALQIPFA |
| | | MQMAYRFNGIGVTQNVLYENQKLIANQFNSAIGKIQDSLSSTA |
| | | SALGKLQDVVNQNAQALNTLVKQLSSNFGAISSVLNDILSRLD |
| | | KVEAEVQIDRLITGRLQSLQTYVTQQLIRAAEIRASANLAATKM |
| | | SECVLGQSKRVDFCGKGYHLMSFPQSAPHGVVFLHVTYVPA |
| | | QEKNFTTAPAICHDGKAHFPREGVFVSNGTHWFVTQRNFYEP |
| | | QIITTDNTFVSGNCDVVIGIVNNTVYDPLQPELDSFKEELDKYF |
| | | KNHTSPDVDLGDISGINASVVNIQKEIDRLNEVAKNLNESLIDLQ |
| | | ELGKYEQYIKWPWYIWLGFIAGLIAIVMVTIMLCCMTSCCSCLK |
| | | GCCSCGSCCKFDEDDSEPVLKGVKLHYT |
| 3 | SARS-CoV | SDLDRCTTFDDVQAPNYTQHTSSMRGVYYPDEIFRSDTLYLT |
| | spike protein | QDLFLPFYSNVTGFHTINHTFDNPVIPFKDGIYFAATEKSNVVR |
| | S1 subunit | GWVFGSTMNNKSQSVIIINNSTNVVIRACNFELCDNPFFAVSK |
| | | PMGTQTHTMIFDNAFNCTFEYISDAFSLDVSEKSGNFKHLREF |
| | | VFKNKDGFLYVYKGYQPIDVVRDLPSGFNTLKPIFKLPLGINITN |
| | | FRAILTAFSPAQDTWGTSAAAYFVGYLKPTTFMLKYDENGTIT |
| | | DAVDCSQNPLAELKCSVKSFEIDKGIYQTSNFRVVPSGDVVRF |
| | | PNITNLCPFGEVFNATKFPSVYAWERKKISNCVADYSVLYNST |
| | | FFSTFKCYGVSATKLNDLCFSNVYADSFVVKGDDVRQIAPGQ |
| | | TGVIADYNYKLPDDFMGCVLAWNTRNIDATSTGNYNYKYRYL |
| | | RHGKLRPFERDISNVPFSPDGKPCTPPALNCYWPLNDYGFYT |
| | | TTGIGYQPYRVVVLSFELLNAPATVCGPKLSTDLIKNQCVNFNF |
| | | NGLTGTGVLTPSSKRFQPFQQFGRDVSDFTDSVRDPKTSEIL |
| | | DISPCSFGGVSVITPGTNASSEVAVLYQDVNCTDVSTAIHADQ |
| | | LTPAWRIYSTGNNVFQTQAGCLIGAEHVDTSYECDIPIGAGICA |
| | | SYHTVSLLR |
| 4 | SARS-CoV | RVVPSGDVVRFPNITNLCPFGEVFNATKFPSVYAWERKKISNC |
| | spike protein | VADYSVLYNSTFFSTFKCYGVSATKLNDLCFSNVYADSFVVKG |
| | RBD | DDVRQIAPGQTGVIADYNYKLPDDFMGCVLAWNTRNIDATST |
| | | GNYNYKYRYLRHGKLRPFERDISNVPFSPDGKPCTPPALNCY |
| | | WPLNDYGFYTTTGIGYQPYRVVVLSFELLNAPATVCGPKLSTD |
| | | LIKNQCVNF |
| 5 | SARS-CoV-2 | SQCVNLTTRTQLPPAYTNSFTRGVYYPDKVFRSSVLHSTQDL |
| | spike protein | FLPFFSNVTWFHAIHVSGTNGTKRFDNPVLPFNDGVYFASTEK |
| | S1 subunit | SNIIRGWIFGTTLDSKTQSLLIVNNATNVVIKVCEFQFCNDPFLG |
| | | VYYHKNNKSWMESEFRVYSSANNCTFEYVSQPFLMDLEGKQ |
| | | GNFKNLREFVFKNIDGYFKIYSKHTPINLVRDLPQGFSALEPLV |
| | | DLPIGINITRFQTLLALHRSYLTPGDSSSGWTAGAAAYYVGYLQ |
| | | PRTFLLKYNENGTITDAVDCALDPLSETKCTLKSFTVEKGIYQT |
| | | SNFRVQPTESIVRFPNITNLCPFGEVFNATRFASVYAWNRKRI |
| | | SNCVADYSVLYNSASFSTFKCYGVSPTKLNDLCFTNVYADSFV |
| | | IRGDEVRQIAPGQTGKIADYNYKLPDDFTGCVIAWNSNNLDSK |
| | | VGGNYNYLYRLFRKSNLKPFERDISTEIYQAGSTPCNGVEGEN |
| | | CYFPLQSYGFQPTNGVGYQPYRVVVLSFELLHAPATVCGPKK |
| | | STNLVKNKCVNFNFNGLTGTGVLTESNKKFLPFQQFGRDIADT |
| | | TDAVRDPQTLEILDITPCSFGGVSVITPGTNTSNQVAVLYQDVN |
| | | CTEVPVAIHADQLTPTWRVYSTGSNVFQTRAGCLIGAEHVNN |
| | | SYECDIPIGAGICASYQTQTNSPRRAR |
| 6 | SARS-CoV-2 | RVQPTESIVRFPNITNLCPFGEVFNATRFASVYAWNRKRISNC |
| | spike protein | VADYSVLYNSASFSTFKCYGVSPTKLNDLCFTNVYADSFVIRG |
| | RBD | DEVRQIAPGQTGKIADYNYKLPDDFTGCVIAWNSNNLDSKVG |
| | | GNYNYLYRLFRKSNLKPFERDISTEIYQAGSTPCNGVEGENCY |
| | | FPLQSYGFQPTNGVGYQPYRVVVLSFELLHAPATVCGPKKST |
| | | NLVKNKCVNF |
| 7 | SARS-CoV-2 | PNITNLCPFGEVFNATRFASVYAWNRKRISNCVADYSVLYNSA |
| | spike protein | SFSTFKCYGVSPTKLNDLCFTNVYDSFVIRGDEVRQIAPGQTG |
| | RBD | KIADYNYKLPDDFTGCVIAWNSNNLDSKVGGNYNYLYRLFRKS |
| | | NLKPFERDISTEIYQAGSTPCNGVEGFNCYFPLQSYGFQPTNG |
| | | VGYQPYRVVVLSFELLHAPATVCGPKKS |
| 8 | SARS-CoV-2 | MLLVNQSHQGFNKEHTSKMVSAIVLYVLLAAAAHSAFAQCVNL |
| | spike protein | TTRTQLPPAYTNSFTRGVYYPDKVFRSSVLHSTQDLFLPFFSN |
| | S1 subunit | VTWFHAIHVSGTNGTKRFDNPVLPFNDGVYFASTEKSNIIRGW |
| | | IFGTTLDSKTQSLLIVNNATNVVIKVCEFQFCNDPFLGVYYHKN |
| | | NKSWMESEFRVYSSANNCTFEYVSQPFLMDLEGKQGNFKNL |
| | | REFVFKNIDGYFKIYSKHTPINLVRDLPQGFSALEPLVDLPIGINI |
| | | TRFQTLLALHRSYLTPGDSSSGWTAGAAAYYVGYLQPRTFLL |
| | | KYNENGTITDAVDCALDPLSETKCTLKSFTVEKGIYQTSNFRV |
| | | QPTESIVRFPNITNLCPFGEVFNATRFASVYAWNRKRISNCVA |
| | | DYSVLYNSASFSTFKCYGVSPTKLNDLCFTNVYADSFVIRGDE |
| | | VRQIAPGQTGKIADYNYKLPDDFTGCVIAWNSNNLDSKVGGN |
| | | YNYLYRLFRKSNLKPFERDISTEIYQAGSTPCNGVEGFNCYFP |
| | | LQSYGFQPTNGVGYQPYRVVVLSFELLHAPATVCGPKKSTNL |
| | | VKNKCVNFNFNGLTGTGVLTESNKKFLPFQQFGRDIADTTDAV |
| | | RDPQTLEILDITPCSFGGVSVITPGTNTSNQVAVLYQDVNCTEV |
| | | PVAIHADQLTPTWRVYSTGSNVFQTRAGCLIGAEHVNNSYEC |
| | | DIPIGAGICASYQTQTNSPRRAR |
| 9 | SARS-CoV | MNITNLCPFGEVFNATKFPSVYAWERKKISNCVADYSVLYNST |
| | spike protein | FFSTFKCYGVSATKLNDLCFSNVYADSFVVKGDDVRQIAPGQ |
| | RBD | TGVIADYNYKLPDDFMGCVLAWNTRNIDATSTGNYNYKYRYL |
| | | RHGKLRPFERDISNVPFSPDGKPCTPPALNCYWPLNDYGFYT |
| | | TTGIGYQPYRVVVLSFELLNAPATYLSLNTAAAL |
| 10 | Artificial | MFIFLFFLTLVSGSTIEKCTTFDDVQPPNYTQFLSSHRGVYYPD |
| | Sarbecovirus | DIFRSDVLHLTQDHFLPFDSNVTGFITFGLNFDNPIIPFKDGIYF |
| | spike | AATEKSNVIRGWVFGSTMNNKSQSVIIMNNSTNVVIRACNFEL |
| | consensus 1 | CDNPFFAVSKPNNTQIPSYIFNNAFNCTFEYVSDDFNLDVGEK |
| | | PGNFKHLREFVFKNKDGFLYVYSGYQPIDVASGLPSGFNALKP |
| | | IFKLPLGINITNFRTLLTAFPPRPDYWGTSAAAYFVGYLKPTTF |
| | | MLKYDENGTITDAVDCSQNPLAELKCSVKSFEIDKGIYQTSNF |
| | | RVVPSGDVVRFPNITNLCPFGEVFNATKFPSVYAWERKRISNC |
| | | VADYSVLYNSTFFSTFKCYGVSATKLNDLCFSNVYADSFVVKG |
| | | DDVRQIAPGQTGVIADYNYKLPDDFMGCVLAWNTRNIDATST |
| | | GNYNYKYRYLRHGKLRPFERDISNVPFSPDGKPCTPPALNCY |
| | | WPLNDYGFYTTTGIGYQPYRVVVLSFELLNAPATVCGPKLSTD |
| | | LIKNQCVNFNFNGLTGTGVLTPSSKRFQPFQQFGRDVSDFTD |
| | | SVRDPKTSEILDISPCSFGGVSVITPGTNTSSEVAVLYQDVNCT |
| | | DVPVAIHADQLTPAWRVYSTGNNVFQTQAGCLIGAEHVDTSY |
| | | ECDIPIGAGICASYHTVSSLRSTSQKSIVAYTMSLGADSSIAYS |
| | | NNTIAIPTNFSISITTEVMPVSMAKTSVDCNMYICGDSTECANLL |
| | | LQYGSFCTQLNRALSGIAVEQDRNTREVFAQVKQMYKTPTLK |
| | | DFGGFNFSQILPDPLKPTKRSFIEDLLFNKVTLADAGFMKQYG |
| | | ECLGDINARDLICAQKFNGLTVLPPLLTDDMIAAYTAALVSGTA |
| | | TAGWTFGAGAALQIPFAMQMAYRFNGIGVTQNVLYENQKQIA |
| | | NQFNKAISQIQESLTTTSTALGKLQDVVNQNAQALNTLVKQLS |
| | | SNFGAISSVLNDILSRLDPPEAEVQIDRLITGRLQSLQTYVTQQ |
| | | LIRAAEIRASANLAATKMSECVLGQSKRVDFCGKGYHLMSFPQ |
| | | AAPHGVVFLHVTYVPSQERNFTTAPAICHEGKAYFPREGVFVF |
| | | NGTSWFITQRNFFSPQIITTDNTFVSGSCDVVIGIINNTVYDPLQ |
| | | PELDSFKEELDKYFKNHTSPDVDLGDISGINASVVNIQKEIDRL |
| | | NEVAKNLNESLIDLQELGKYEQYIKWPWYVWLGFIAGLIAIVMV |
| | | TILLCCMTSCCSCLKGACSCGSCCKFDEDDSEPVLKGVKLHY |
| | | T |
| 11 | Artificial | MFIFLLFFTLTSGSDLDRCTTFDDVQAPNYTQHTSSMRGVYYP |
| | Sarbecovirus | DEIFRSDTLYLTQDLFLPFYSNVTGFHTINHTFDNPVIPFKDGIY |
| | spike | FAATEKSNVVRGWVFGSTMNNKSQSVIIINNSTNVVIRACNFE |
| | consensus 2 | LCDNPFFVVSKPMGTRTHTMIFDNAFNCTFEYISDAFSLDVSE |
| | | KSGNFKHLREFVFKNKDGFLYVYKGYQPIDVVRDLPSGFNTLK |
| | | PIFKLPLGIKITNFRAILTAFSPAQGTWGTSAAAYFVGYLKPTTF |
| | | MLKYDENGTITDAVDCSQNPLAELKCSVKSFEIDKGIYQTSNF |
| | | RVVPSGDVVRFPNITNLCPFGEVFNATKFPSVYAWERKRISNC |
| | | VADYSVLYNSTSFSTFKCYGVSATKLNDLCFSNVYADSFVVKG |
| | | DDVRQIAPGQTGVIADYNYKLPDDFMGCVLAWNTRNIDATST |
| | | GNHNYKYRYLRHGKLRPFERDISNVPFSPDGKPCTPPAPNCY |
| | | WPLRGYGFYTTSGIGYQPYRVVVLSFELLNAPATVCGPKLSTD |
| | | LIKNQCVNFNFNGLTGTGVLTPSSKRFQPFQQFGRDVSDFTD |
| | | SVRDPKTSEILDISPRSFGGVSVITPGTNASSEVAVLYQDVNCT |
| | | DVSTLIHAEQLTPAWRIYSTGNNVFQTQAGCLIGAEHVDTSYE |
| | | CDIPIGAGICASYHTVSSLRSTSQKSIVAYTMSLGADSSIAYSN |
| | | NTIAIPTNFSISITTEVMPVSMTKTSVDCNMYICGDSTECANLLL |
| | | QYGSFCRQLNRALSGIAAEQDRNTREVFVQVKQMYKTPTLKD |
| | | FGGFNFSQILPDPLKPTKRSFIEDLLFNKVTLADAGFMKQYGE |
| | | CLGDINARDLICAQKFNGLTVLPPLLTVDMIAAYTAALVSGTAT |
| | | AGWTFGAGAALQIPFAMQMAYRFNGIGVTQNVLYENQKQIAN |
| | | QFNKAISQIQESLTTTSTALGKLQDVVNQNAQALNTLVKQLSS |
| | | NFGAISSVLNDILSRLDPPEAEVQIDRLITGRLQSLQTYVTQQLI |
| | | RAAEIRASANLAATKMSECVLGQSKRVGFCGKGYHLMSFPQA |
| | | APHGVVFLHVTYVPSQERNFTTAPAICHEGKAYFPREGVFVFS |
| | | GTSWFITQRNFFSPQIITTDNTFVSGNCDVVIGIINNTVYDPLQP |
| | | ELDSFKEELDKYFKNHTSPDVDLGDISGINASVVNIQEEIDRLN |
| | | EVAKNLNESLIDLQELGKYEQYIKWPWYVWLGFIAGLIAIVMVTI |
| | | LLCCMTSCCSCLKGACSCGSCCKFDEDDSEPVLKGVKLHYT |
| 12 | Artificial | MFIFLFFLTLVSGSDLESCTTFDDVQAPNYPQHSSSRRGVYYP |
| | Sarbecovirus | DEIFRSDTLYLTQDLFLPFDSNVTGFHTINHRFDNPVIPFKDGV |
| | spike | YFAATEKSNVVRGWVFGSTMNNKSQSVIIINNSTNVVIRACNF |
| | consensus 3 | ELCDNPFFAVSKPTGTQTHTMIFNNAFNCTFEYISDSFSLDVA |
| | | EKSGNFKHLREFVFKNKDGFLYVYKGYQPIDVVRDLPSGFNIL |
| | | KPIFKLPLGINITNFRAILTAFLPAQDTWGTSAAAYFVGYLKPAT |
| | | FMLKYDENGTITDAVDCSQNPLAELKCSVKSFEIDKGIYQTSNF |
| | | RVAPSKEVVRFPNITNLCPFGEVFNATTFPSVYAWERKRISNC |
| | | VADYSVLYNSTSFSTFKCYGVSATKLNDLCFSNVYADSFVVKG |
| | | DDVRQIAPGQTGVIADYNYKLPDDFTGCVLAWNTRNIDATQT |
| | | GNYNYKYRSLRHGKLRPFERDISNVPFSPDGKPCTPPAFNCY |
| | | WPLNDYGFYTTNGIGYQPYRVVVLSFELLNAPATVCGPKLSTD |
| | | LIKNQCVNFNFNGLTGTGVLTPSSKRFQPFQQFGRDVSDFTD |
| | | SVRDPKTSEILDISPCSFGGVSVITPGTNTSSEVAVLYQDVNCT |
| | | DVPVAIHADQLTPAWRIYSTGNNVFQTQAGCLIGAEHVDTSYE |
| | | CDIPIGAGICASYHTVSSLRSTSQKSIVAYTMSLGADSSIAYSN |
| | | NTIAIPTNFSISITTEVMPVSMAKTSVDCNMYICGDSTECANLLL |
| | | QYGSFCTQLNRALSGIAVEQDRNTREVFAQVKQMYKTPTLKD |
| | | FGGFNFSQILPDPLKPTKRSFIEDLLFNKVTLADAGFMKQYGE |
| | | CLGDINARDLICAQKFNGLTVLPPLLTDDMIAAYTAALVSGTAT |
| | | AGWTFGAGAALQIPFAMQMAYRFNGIGVTQNVLYENQKQIAN |
| | | QFNKAISQIQESLTTTSTALGKLQDVVNQNAQALNTLVKQLSS |
| | | NFGAISSVLNDILSRLDPPEAEVQIDRLITGRLQSLQTYVTQQLI |
| | | RAAEIRASANLAATKMSECVLGQSKRVDFCGKGYHLMSFPQA |
| | | APHGVVFLHVTYVPSQERNFTTAPAICHEGKAYFPREGVFVFN |
| | | GTSWFITQRNFFSPQIITTDNTFVSGNCDVVIGIINNTVYDPLQP |
| | | ELDSFKEELDKYFKNHTSPDVDLGDISGINASVVNIQKEIDRLN |
| | | EVAKNLNESLIDLQELGKYEQYIKWPWYVWLGFIAGLIAIVMVTI |
| | | LLCCMTSCCSCLKGACSCGSCCKFDEDDSEPVLKGVKLHYT |
| 13 | Artificial | MFIFLFFLTLVSGSTIEKCTTFDDVQPPNYTQFLSSHRGVYYPD |
| | Sarbecovirus | DIFRSDVLHLTQDHFLPFDSNVTGFITFGLNFDNPIIPFKDGIYF |
| | spike | AATEKSNVIRGWVFGSTMNNKSQSVIIMNNSTNVVIRACNFEL |
| | consensus 4 | CDNPFFAVSKPNNTQIPSYIFNNAFNCTFEYVSDDFNLDVGEK |
| | | PGNFKHLREFVFKNKDGFLYVYSGYQPIDVASGLPSGFNALKP |
| | | IFKLPLGINITNFRTLLTAFPPRPDYWGTSAAAYFVGYLKPTTF |
| | | MLKYDENGTITDAVDCSQNPLAELKCSVKSFEIDKGIYQTSNF |
| | | RVAPSKEVVRFPNITNLCPFGEVFNATTFPSVYAWERKRISNC |
| | | VADYSVLYNSTSFSTFKCYGVSATKLNDLCFSNVYADSFVVKG |
| | | DDVRQIAPGQTGVIADYNYKLPDDFMGCVLAWNTRNIDATST |
| | | GNYNYKYRSLRHGKLRPFERDISNVPFSPDGKPCTPPAFNCY |
| | | WPLNDYGFFTTNGIGYQPYRVVVLSFELLNAPATVCGPKLSTD |
| | | LIKNQCVNFNFNGLTGTGVLTPSSKRFQPFQQFGRDVSDFTD |
| | | SVRDPKTSEILDISPCSFGGVSVITPGTNTSSEVAVLYQDVNCT |
| | | DVPVAIHADQLTPAWRVYSTGNNVFQTQAGCLIGAEHVDTSY |
| | | ECDIPIGAGICASYHTVSSLRSTSQKSIVAYTMSLGADSSIAYS |
| | | NNTIAIPTNFSISITTEVMPVSMAKTSVDCNMYICGDSTECANLL |
| | | LQYGSFCTQLNRALSGIAVEQDRNTREVFAQVKQMYKTPTLK |
| | | DFGGFNFSQILPDPLKPTKRSFIEDLLFNKVTLADAGFMKQYG |
| | | ECLGDINARDLICAQKFNGLTVLPPLLTDDMIAAYTAALVSGTA |
| | | TAGWTFGAGAALQIPFAMQMAYRFNGIGVTQNVLYENQKQIA |
| | | NQFNKAISQIQESLTTTSTALGKLQDVVNQNAQALNTLVKQLS |
| | | SNFGAISSVLNDILSRLDPPEAEVQIDRLITGRLQSLQTYVTQQ |
| | | LIRAAEIRASANLAATKMSECVLGQSKRVDFCGKGYHLMSFPQ |
| | | AAPHGVVFLHVTYVPSQERNFTTAPAICHEGKAYFPREGVFVF |
| | | NGTSWFITQRNFFSPQIITTDNTFVSGSCDVVIGIINNTVYDPLQ |
| | | PELDSFKEELDKYFKNHTSPDVDLGDISGINASVVNIQKEIDRL |
| | | NEVAKNLNESLIDLQELGKYEQYIKWPWYVWLGFIAGLIAIVMV |
| | | TILLCCMTSCCSCLKGACSCGSCCKFDEDDSEPVLKGVKLHY |
| | | T |
| 14 | Artificial | MFVFLFLLPLVSSQCVNLTTRTGIPPGYTNSSTRGVYYPDKVF |
| | Sarbecovirus | RSSVLHLTQDLFLPFFSNVTWFNAINYQGGFKRFDNPVLPFND |
| | spike | GVYFASTEKSNIIRGWIFGTTLDARTQSLLIVNNATNVVIKVCEF |
| | consensus 5 | QFCTDPFLGVYYHNNNKTWVENEFRVYSSANNCTFEYVSQP |
| | | FLMDLEGKQGNFKNLREFVFKNVDGYFKIYSKHTPIDLVRDLP |
| | | RGFSALEPLVDLPIGINITRFQTLLALHRSYLTPGKLESGWTTG |
| | | AAAYYVGYLQPRTFLLSYNENGTITDAVDCALDPLSETKCTLK |
| | | SLTVEKGIYQTSNFRVQPTISIVRFPNITNLCPFGEVFNATRFAS |
| | | VYAWNRKRISNCVADYSVLYNSTSFSTFKCYGVSPTKLNDLCF |
| | | TNVYADSFVVRGDEVRQIAPGQTGVIADYNYKLPDDFTGCVIA |
| | | WNSVKQDALTGGNYNYLYRLFRKSKLKPFERDISTEIYQAGST |
| | | PCNGVVGLNCYYPLQRYGFHPTTGVGYQPYRVVVLSFELLNA |
| | | PATVCGPKKSTNLVKNKCVNFNFNGLTGTGVLTESNKKFLPF |
| | | QQFGRDIADTTDAVRDPQTLEILDITPCSFGGVSVITPGTNTSN |
| | | QVAVLYQDVNCTEVPVAIHADQLTPTWRVYSTGSNVFQTRAG |
| | | CLIGAEHVNNSYECDIPIGAGICASYQTQTNSPRRARSVNSQSI |
| | | IAYTMSLGAENSVAYSNNSIAIPTNFTISVTTEILPVSMTKTSVD |
| | | CTMYICGDSIECSNLLLQYGSFCTQLNRALTGIAVEQDKNTQE |
| | | VFAQVKQIYKTPPIKDFGGFNFSQILPDPSKPSKRSFIEDLLFNK |
| | | VTLADAGFIKQYGDCLGDIAARDLICAQKFNGLTVLPPLLTDEM |
| | | IAQYTSALLAGTITSGWTFGAGAALQIPFAMQMAYRFNGIGVT |
| | | QNVLYENQKLIANQFNSAIGKIQDSLSSTASALGKLQDVVNQN |
| | | AQALNTLVKQLSSNFGAISSVLNDILSRLDPPEAEVQIDRLITGR |
| | | LQSLQTYVTQQLIRAAEIRASANLAATKMSECVLGQSKRVDFC |
| | | GKGYHLMSFPQSAPHGVVFLHVTYVPAQEKNFTTAPAICHEG |
| | | KAHFPREGVFVSNGTHWFVTQRNFYEPQIITTDNTFVSGSCD |
| | | VVIGIVNNTVYDPLQPELDSFKEELDKYFKNHTSPDVDLGDISG |
| | | INASVVNIQKEIDRLNEVAKNLNESLIDLQELGKYEQYIKWPWYI |
| | | WLGFIAGLIAIIMVTIMLCCMTSCCSCLKGCCSCGSCCKFDED |
| | | DSEPVLKGVKLHYT |
| 15 | Artificial | MFVFLFLLPLVSSQCVNLTTRTGIPPGYTNSSTRGVYYPDKVF |
| | Sarbecovirus | RSSVLHLTQDLFLPFFSNVTWFNAINYQGGFKRFDNPVLPFND |
| | spike | GVYFASTEKSNIIRGWIFGTTLDARTQSLLIVNNATNVVIKVCEF |
| | consensus 6 | QFCTDPFLGVYYHNNNKTWVENEFRVYSSANNCTFEYVSQP |
| | | FLMDLEGKQGNFKNLREFVFKNVDGYFKIYSKHTPIDLVRDLP |
| | | RGFSALEPLVDLPIGINITRFQTLLALHRSYLTPGKLESGWTTG |
| | | AAAYYVGYLQPRTFLLSYNENGTITDAVDCALDPLSETKCTLK |
| | | SFTVEKGIYQTSNFRVQPTESIVRFPNITNLCPFGEVFNATRFA |
| | | SVYAWNRKRISNCVADYSVLYNSASFSTFKCYGVSPTKLNDL |
| | | CFTNVYADSFVIRGDEVRQIAPGQTGKIADYNYKLPDDFTGCVI |
| | | AWNSNNLDSKVGGNYNYLYRLFRKSNLKPFERDISTEIYQAGS |
| | | TPCNGVEGFNCYFPLQSYGFQPTNGVGYQPYRVVVLSFELLH |
| | | APATVCGPKKSTNLVKNKCVNFNFNGLTGTGVLTESNKKFLPF |
| | | QQFGRDIADTTDAVRDPQTLEILDITPCSFGGVSVITPGTNTSN |
| | | QVAVLYQDVNCTEVPVAIHADQLTPTWRVYSTGSNVFQTRAG |
| | | CLIGAEHVNNSYECDIPIGAGICASYQTQTNSPRRARSVNSQSI |
| | | IAYTMSLGAENSVAYSNNSIAIPTNFTISVTTEILPVSMTKTSVD |
| | | CTMYICGDSIECSNLLLQYGSFCTQLNRALTGIAVEQDKNTQE |
| | | VFAQVKQIYKTPPIKDFGGFNFSQILPDPSKPSKRSFIEDLLFNK |
| | | VTLADAGFIKQYGDCLGDIAARDLICAQKFNGLTVLPPLLTDEM |
| | | IAQYTSALLAGTITSGWTFGAGAALQIPFAMQMAYRFNGIGVT |
| | | QNVLYENQKLIANQFNSAIGKIQDSLSSTASALGKLQDVVNQN |
| | | AQALNTLVKQLSSNFGAISSVLNDILSRLDPPEAEVQIDRLITGR |
| | | LQSLQTYVTQQLIRAAEIRASANLAATKMSECVLGQSKRVDFC |
| | | GKGYHLMSFPQSAPHGVVFLHVTYVPAQEKNFTTAPAICHEG |
| | | KAHFPREGVFVSNGTHWFVTQRNFYEPQIITTDNTFVSGSCD |
| | | VVIGIVNNTVYDPLQPELDSFKEELDKYFKNHTSPDVDLGDISG |
| | | INASVVNIQKEIDRLNEVAKNLNESLIDLQELGKYEQYIKWPWYI |
| | | WLGFIAGLIAIIMVTIMLCCMTSCCSCLKGCCSCGSCCKFDED |
| | | DSEPVLKGVKLHYT |
| 16 | Artificial | MFVFLFLLPLVSSQCVNLTTRTGIPPGYTNSSTRGVYYPDKVF |
| | Sarbecovirus | RSSILHLTQDLFLPFFSNVTWFNTINYQGGFKKFDNPVLPFND |
| | spike | GVYFASTEKSNIIRGWIFGTTLDNTTQSLLIVNNATNVVIKVCEF |
| | consensus 7 | QFCTDPFLGVYYHNNNKTWVENEFRVYSSANNCTFEYVSQP |
| | | FLMDLEGKQGNFKNLREFVFKNVDGYFKIYSKHTPIDLVRDLP |
| | | RGFSALEPLVDLPIGINITRFQTLLALHRSYLTPGKLESGWTTG |
| | | AAAYYVGYLQQRTFLLSYNENGTITDAVDCSLDPLSETKCTLK |
| | | SLTVEKGIYQTSNFRVQPTISIVRFPNITNLCPFGEVFNATKFAS |
| | | VYAWNRKRISNCVADYSVLYNSTSFSTFKCYGVSPTKLNDLCF |
| | | TNVYADSFVVRGDEVRQIAPGQTGVIADYNYKLPDDFTGC |
| | | VIAWNSVKQDAKTGGNYNYLYRLFRKSKLKPFERDISTEIYQA |
| | | GSTPCNGVVGLNCYYPLERYGFHPTNGVGYQPYRVVVLSFEL |
| | | LNAPATVCGPKLSTTLVKNKCVNFNFNGLTGTGVLTTSKKKFL |
| | | PFQQFGRDISDTTDAVRDPQTLEILDITPCSFGGVSVITPGTNT |
| | | SNQVAVLYQDVNCTEVPMAIHADQLTPTWRVYSTGANVFQTR |
| | | AGCLIGAEHVNNSYECDIPIGAGICASYHTQTNSRSVNSQSIIA |
| | | YTMSLGAENSVAYSNNSIAIPTNFTISVTTEILPVSMTKTSVDCT |
| | | MYICGDSIECSNLLLQYGSFCTQLNRALTGIAVEQDKNTQEVF |
| | | AQVKQIYKTPPIKDFGGFNFSQILPDPSKPSKRSFIEDLLFNKVT |
| | | LADAGFIKQYGDCLGDIAARDLICAQKFNGLTVLPPLLTDEMIA |
| | | QYTSALLAGTITSGWTFGAGAALQIPFAMQMAYRFNGIGVTQN |
| | | VLYENQKLIANQFNSAIGKIQDSLSSTASALGKLQDVVNQNAQ |
| | | ALNTLVKQLSSNFGAISSVLNDILSRLDPPEAEVQIDRLITGRLQ |
| | | SLQTYVTQQLIRAAEIRASANLAATKMSECVLGQSKRVDFCGK |
| | | GYHLMSFPQSAPHGVVFLHVTYVPAQEKNFTTAPAICHEGKA |
| | | HFPREGVFVSNGTHWFVTQRNFYEPQIITTDNTFVSGSCDVVI |
| | | GIVNNTVYDPLQPELDSFKEELDKYFKNHTSPDVDLGDISGINA |
| | | SVVNIQKEIDRLNEVAKNLNESLIDLQELGKYEQYIKWPWYIWL |
| | | GFIAGLIAIIMVTIMLCCMTSCCSCLKGCCSCGSCCKFDEDDSE |
| | | PVLKGVKLHYT |
| 17 | Artificial | MFIFLFFLTLVSSQCVNFDDRTPPPPTQTNSSTRGVYYPDDIF |
| | Sarbecovirus | RSSVLHLTQDLFLPFFSNVTWFHTINYRFDNPVIPFKDGVYFAA |
| | spike | TEKSNVIRGWIFGSTMDNKSQSVIIVNNSTNVVIRVCNFQLCDN |
| | consensus 8 | PFFAVYNKTWTQIESRVYSNAFNCTFEYVSKSFLLDLGEKQGN |
| | | FKHLREFVFKNKDGFLKVYSGYTPIDLVRDLPSGFNALKPIFKL |
| | | PLGINITNFRTLLTAFRPGQSGWGTSAAAYFVGYLKPRTFMLK |
| | | YDENGTITDAVDCSQDPLAELKCTLKSFEVEKGIYQTSNFRVQ |
| | | PTKEVVRFPNITNLCPFGEVFNATTFPSVYAWERKRISNCVAD |
| | | YSVLYNSTSFSTFKCYGVSPTKLNDLCFSNVYADSFVVKGDD |
| | | VRQIAPGQTGVIADYNYKLPDDFTGCVLAWNTRNIDATTGGNY |
| | | NYLYRLFRHSKLKPFERDISNVIYSPGGKPCTPPGFNCYWPLN |
| | | DYGFYPTNGVGYQPYRVVVLSFELLNAPATVCGPKLSTDLVK |
| | | NKCVNFNFNGLTGTGVLTPSSKRFQPFQQFGRDVSDFTDSVR |
| | | DPKTLEILDISPCSFGGVSVITPGTNTSSEVAVLYQDVNCTDVP |
| | | VAIHADQLTPAWRVYSTGNNVFQTQAGCLIGAEHVNNSYECDI |
| | | PIGAGICASYHTVSSLRSTSQKSIVAYTMSLGAENSIAYSNNSIA |
| | | IPTNFSISVTTEVLPVSMTKTSVDCTMYICGDSTECSNLLLQYG |
| | | SFCTQLNRALSGIAVEQDKNTQEVFAQVKQIYKTPPIKDFGGF |
| | | NFSQILPDPSKPSKRSFIEDLLFNKVTLADAGFMKQYGDCLGDI |
| | | NARDLICAQKFNGLTVLPPLLTDEMIAAYTAALVSGTATAGWT |
| | | FGAGAALQIPFAMQMAYRFNGIGVTQNVLYENQKQIANQFNK |
| | | AISQIQESLTTTSTALGKLQDVVNQNAQALNTLVKQLSSNFGAI |
| | | SSVLNDILSRLDPPEAEVQIDRLITGRLQSLQTYVTQQLIRAAEI |
| | | RASANLAATKMSECVLGQSKRVDFCGKGYHLMSFPQAAPHG |
| | | VVFLHVTYVPSQERNFTTAPAICHEGKAHFPREGVFVSNGTH |
| | | WFITQRNFYSPQIITTDNTFVSGSCDVVIGIVNNTVYDPLQPEL |
| | | DSFKEELDKYFKNHTSPDVDLGDISGINASVVNIQKEIDRLNEV |
| | | AKNLNESLIDLQELGKYEQYIKWPWYVWLGFIAGLIAIVMVTIM |
| | | LCCMTSCCSCLKGCCSCGSCCKFDEDDSEPVLKGVKLHYT |
| 18 | Artificial | SNFRVVPSGDVVRFPNITNLCPFGEVFNATKFPSVYAWERKRI |
| | Sarbecovirus | SNCVADYSVLYNSTSFSTFKCYGVSATKLNDLCFSNVYADSFV |
| | RBD | VKGDDVRQIAPGQTGVIADYNYKLPDDFMGCVLAWNTRNIDA |
| | consensus 1 | TSTGNHNYKYRYLRHGKLRPFERDISNVPFSPDGKPCTPPAP |
| | | NCYWPLRGYGFYTTSGIGYQPYRVVVLSFELLNAPATVCGPK |
| | | LSTDLIKNQCVNFNFNGLTGTGVLTPSSKRFQPFQQFGRDVS |
| | | DFTDSVRDPKTSEIL |
| 19 | Artificial | SNFRVAPSKEVVRFPNITNLCPFGEVFNATTFPSVYAWERKRI |
| | Sarbecovirus | SNCVADYSVLYNSTSFSTFKCYGVSATKLNDLCFSNVYADSFV |
| | RBD | VKGDDVRQIAPGQTGVIADYNYKLPDDFTGCVLAWNTRNIDAT |
| | consensus 2 | QTGNYNYKYRSLRHGKLRPFERDISNVPFSPDGKPCTPPAFN |
| | | CYWPLNDYGYTTNGIGYQPYRVVVLSFELLNAPATVCGPKLS |
| | | TDLIKNQCVNFNFNGLTGTGVLTPSSRFQPFQQFGRDVSDFT |
| | | DSVRDPKTSEIL |
| 20 | Artificial | SNFRVQPTISIVRFPNITNLCPFGEVFNATRFASVYAWNRKRIS |
| | Sarbecovirus | NCVADYSVLYNSTSFSTFKCYGVSPTKLNDLCFTNVYADSFVV |
| | RBD | RGDEVRQIAPGQTGVIADYNYKLPDDFTGCVIAWNSVKQDAL |
| | consensus 3 | TGGNYNYLYRLFRKSKLKPFERDISTEIYQAGSTPCNGVVGLN |
| | | CYYPLQRYGFHPTTGVGYQPYRVVVLSFELLNAPATVCGPKK |
| | | STNLVKNKCVNFNFNGLTGTGVLTESNKKFLPFQQFGRDIADT |
| | | TDAVRDPQTLEIL |
| 21 | Artificial | SNFRVQPTISIVRFPNITNLCPFGEVFNATKFASVYAWNRKRIS |
| | Sarbecovirus | NCVADYSVLYNSTSFSTFKCYGVSPTKLNDLCFTNVYADSFVV |
| | RBD | RGDEVRQIAPGQTGVIADYNYKLPDDFTGCVIAWNSVKQDAK |
| | consensus 4 | TGGNYNYLYRLFRKSKLKPFERDISTEIYQAGSTPCNGVVGLN |
| | | CYYPLERYGFHPTNGVGYQPYRVVVLSFELLNAPATVCGPKL |
| | | STTLVKNKCVNFNFNGLTGTGVLTTSKKKFLPFQQFGRDISDT |
| | | TDAVRDPQTLEIL |
| 22 | Artificial | SNFRVQPTKEVVRFPNITNLCPFGEVFNATTFPSVYAWERKRI |
| | Sarbecovirus | SNCVADYSVLYNSTSFSTFKCYGVSPTKLNDLCFSNVYADSFV |
| | RBD | VKGDDVRQIAPGQTGVIADYNYKLPDDFTGCVLAWNTRNIDAT |
| | consensus 5 | TGGNYNYLYRLFRHSKLKPFERDISNVIYSPGGKPCTPPGFNC |
| | | YWPLNDYGFYPTNGVGYQPYRVVVLSFELLNAPATVCGPKLS |
| | | TDLVKNKCVNFNFNGLTGTGVLTPSSKRFQPFQQFGRDVSDF |
| | | TDSVRDPKTLEIL |
| 23 | Coronavirus | MKLLVLVFATLVSSYTIEKCTDFDDRTPPSNTQFLSSHRGVYY |
| | BtRs- | PDDIFRSNVLHLVQDHFLPFDSNVTRFITFGLNFDNP |
| | BetaCoV/ | IIPFRDGVYFAATEKSNVIRGWVFGSTMNNKSQSVIIMNNSTNL |
| | YN2018B Spike | VIRACNFELCDNPFFVVLRSNNTQIPSYIFNNAFNC |
| | protein | TFEYVSKDFNLDIGEKPGNFKDLREFVFRNKDGFLHVYSGYQ |
| | (Genbank: | PISAASGLPTGFNALKPIFKLPLGINITNFRTLLTAFP |
| | QDF43825) | PNPGYWGTSAAAYFVGYLKPTTFMLKYDENGTITDAVDCSQN |
| | | PLAELKCSVKSFEIDKGIYQTSNFRVAPSKEVVRFPNI |
| | | TNLCPFGEVFNATTFPSVYAWERKRISNCVADYSVLYNSTSFS |
| | | TFKCYGVSATKLNDLCFSNVYADSFVVKGDDVRQIAP |
| | | GQTGVIADYNYKLPDDFMGCVLAWNTRNIDATSTGNYNYKYR |
| | | SLRHGKLRPFERDISNVPFSPDGKPCTPPAFNCYWPLN |
| | | DYGFFTTNGIGYQPYRVVVLSFELLNAPATVCGPKLSTDLIKN |
| | | QCVNFNFNGLTGTGVLTPSSKRFQPFQQFGRDVSDFT |
| | | DSVRDPKTSEILDISPCSFGGVSVITPGTNTSSEVAVLYQDVNC |
| | | TDVPVAIHADQLTPAWRIYSTGNNVFQTQAGCLIGA |
| | | EHVDTSYECDIPIGAGICASYHTVSSLRSTSQKSIVAYTMSLGA |
| | | DSSIAYSNNTIAIPTNFSISITTEVMPVSMAKTSVD |
| | | CNMYICGDSTECANLLLQYGSFCTQLNRALSGIAVEQDRNTR |
| | | EVFAQVKQMYKTPTLKDFGGFNFSQILPDPLKPTKRSF |
| | | IEDLLFNKVTLADAGFMKQYGECLGDINARDLICAQKFNGLTVL |
| | | PPLLTDDMIAAYTAALVSGTATAGWTFGAGAALQIP |
| | | FAMQMAYRFNGIGVTQNVLYENQKQIANQFNKAISQIQESLTT |
| | | TSTALGKLQDVVNQNAQALNTLVKQLSSNFGAISSVL |
| | | NDILSRLDKVEAEVQIDRLITGRLQSLQTYVTQQLIRAAEIRASA |
| | | NLAATKMSECVLGQSKRVDFCGKGYHLMSFPQAAP |
| | | HGVVFLHVTYVPSQERNFTTAPAICHEGKAYFPREGVFVFNG |
| | | TSWFITQRNFFSPQIITTDNTFVSGSCDVVIGIINNTV |
| | | YDPLQPELDSFKEELDKYFKNHTSPDVDLGDISGINASVVNIQK |
| | | EIDRLNEVAKNLNESLIDLQELGKYEQYIKWPWYVW |
| | | LGFIAGLIAIVMVTILLCCMTSCCSCLKGACSCGSCCKFDEDDS |
| | | EPVLKGVKLHYT |
| 24 | Bat SARS-like | MKLLVLVFATLVSSYTIEKCLDFDDRTPPANTQFLSSHRGVYY |
| | coronavirus | PDDIFRSNVLHLVQDHFLPFDSNVTRFITFGLNFDNP |
| | Spike protein | IIPFRDGIYFAATEKSNVIRGWVFGSTMNNKSQSVIIMNNSTNL |
| | (Genbank: | VIRACNFELCDNPFFVVLKSNNTQIPSYIFNNAFNC |
| | ATO98218) | TFEYVSKDFNLDLGEKPGNFKDLREFVFRNKDGFLHVYSGYQ |
| | | PISAASGLPTGFNALKPIFKLPLGINITNFRTLLTAFP |
| | | PRPDYWGTSAAAYFVGYLKPTTFMLKYDENGTITDAVDCSQN |
| | | PLAELKCSVKSFEIDKGIYQTSNFRVAPSKEVVRFPNI |
| | | TNLCPFGEVFNATTFPSVYAWERKRISNCVADYSVLYNSTSFS |
| | | TFKCYGVSATKLNDLCFSNVYADSFVVKGDDVRQIAP |
| | | GQTGVIADYNYKLPDDFMGCVLAWNTRNIDATSTGNYNYKYR |
| | | SLRHGKLRPFERDISNVPFSPDGKPCTPPAFNCYWPLN |
| | | DYGFFTTNGIGYQPYRVVVLSFELLNAPATVCGPKLSTDLIKN |
| | | QCVNFNFNGLTGTGVLTSSSKRFQPFQQFGRDVSDFT |
| | | DSVRDPKTSEILDISPCSFGGVSVITPGTNTSSEVAVLYQDVNC |
| | | TDVPVAIHADQLTPAWRIYSTGNNVFQTQAGCLIGA |
| | | EHVDTSYECDIPIGAGICASYHTVSSLRSTSQKSIVAYTMSLGA |
| | | DSSIVYSNNTIAIPTNFSISITTEVMPVSMAKTSVD |
| | | CNMYICGDSTECANLLLQYGSFCTQLNRALSGIAVEQDRNTR |
| | | EVFAQVKQMYKTPTLKDFGGFNFSQILPDPLKPTKRSF |
| | | IEDLLFNKVTLADAGFMKQYGECLGDINARDLICAQKFNGLTVL |
| | | PPLLTDDMIAAYTAALVSGTATAGWTFGAGAALQIP |
| | | FAMQMAYRFNGIGVTQNVLYENQKQIANQFNKAISQIQESLTT |
| | | TSTALGKLQDVVNQNAQALNTLVKQLSSNFGAISSVL |
| | | NDILSRLDKVEAEVQIDRLITGRLQSLQTYVTQQLIRAAEIRASA |
| | | NLAATKMSECVLGQSKRVDFCGKGYHLMSFPQAAP |
| | | HGVVFLHVTYVPSQERNFTTAPAICHEGKAYFPREGVFVFNG |
| | | TSWFITQRNFFSPQIITTDNTFVSGNCDVVIGIINNTV |
| | | YDPLQPELDSFKEELDKYFKNHTSPDVDLGDISGINASVVNIQK |
| | | EIDRLNEVAKNLNESLIDLQELGKYEQYIKWPWYVW |
| | | LGFIAGLIAIVMVTILLCCMTSCCSCLKGACSCGSCCKFDEDDS |
| | | EPVLKGVKLHYT |
| 25 | Bat SARS-like | MKLLVLVFATLVSSYTIEKCLDFDDRTPPANTQFLSSHRGVYY |
| | coronavirus | PDDIFRSNVLHLVQDHFLPFDSNVTRFITFGLNFDNP |
| | Spike protein | IIPFRDGIYFAATEKSNVIRGWVFGSTMNNKSQSVIIMNNSTNL |
| | (Genbank: | VIRACNFELCDNPFFVVLKSNNTQIPSYIFNNAFNC |
| | ATO98231) | TFEYVSKDFNLDLGEKPGNFKDLREFVFRNKDGFLHVYSGYQ |
| | | PISAASGLPTGFNALKPIFKLPLGINITNFRTLLTAFP |
| | | PRPDYWGTSAAAYFVGYLKPTTFMLKYDENGTITDAVDCSQN |
| | | PLAELKCSVKSFEIDKGIYQTSNFRVAPSKEVVRFPNI |
| | | TNLCPFGEVFNATTFPSVYAWERKRISNCVADYSVLYNSTSFS |
| | | TFKCYGVSATKLNDLCFSNVYADSFVVKGDDVRQIAP |
| | | GQTGVIADYNYKLPDDFMGCVLAWNTRNIDATSTGNYNYKYR |
| | | SLRHGKLRPFERDISNVPFSPDGKPCTPPAFNCYWPLN |
| | | DYGFFTTNGIGYQPYRVVVLSFELLNAPATVCGPKLSTDLIKN |
| | | QCVNFNFNGLTGTGVLTSSSKRFQPFQQFGRDVSDFT |
| | | DSVRDPKTSEILDISPCSFGGVSVITPGTNTSSEVAVLYQDVNC |
| | | TDVPVAIHADQLTPAWRIYSTGNNVFQTQAGCLIGA |
| | | EHVDTSYECDIPIGAGICASYHTVSSLRSTSQKSIVAYTMSLGA |
| | | DSSIVYSNNTIAIPTNFSISITTEVMPVSMAKTSVD |
| | | CNMYICGDSTECANLLLQYGSFCTQLNRALSGIAVEQDRNTR |
| | | EVFAQVKQMYKTPTLKDFGGFNFSQILPDPLKPTKRSF |
| | | IEDLLFNKVTLADAGFMKQYGECLGDINARDLICAQKFNGLTVL |
| | | PPLLTDDMIAAYTAALVSGTATAGWTFGAGAALQIP |
| | | FAMQMAYRFNGIGVTQNVLYENQKQIANQFNKAISQIQESLTT |
| | | TSTALGKLQDVVNQNAQALNTLVKQLSSNFGAISSVL |
| | | NDILSRLDKVEAEVQIDRLITGRLQSLQTYVTQQLIRAAEIRASA |
| | | NLAATKMSECVLGQSKRVDFCGKGYHLMSFPQAAP |
| | | HGVVFLHVTYVPSQERNFTTAPAICHEGKAYFPREGVFVFNG |
| | | TSWFITQRNFFSPQIITTDNTFVSGNCDVVIGIINNTV |
| | | YDPLQPELDSFKEELDKYFKNHTSPDVDLGDISGINASVVNIQK |
| | | EIDRLNEVAKNLNESLIDLQELGKYEQYIKWPWYVW |
| | | LGFIAGLIAIVMVTILLCCMTSCCSCLKGACSCGSCCKFDEDDP |
| | | EPVLKGVKLHYT |
| 26 | Bat SARS-like | MKLLVLVFATLVSSYTIEKCLDFDDRTPPANTQFLSSHRGVYY |
| | coronavirus | PDDIFRSNVLHLVQDHFLPFDSNVTRFITFGLNFDNP |
| | RsSHC014 | IIPFRDGIYFAATEKSNVIRGWVFGSTMNNKSQSVIIMNNSTNL |
| | Spike protein | VIRACNFELCDNPFFVVLKSNNTQIPSYIFNNAFNC |
| | (Genbank: | TFEYVSKDFNLDLGEKPGNFKDLREFVFRNKDGFLHVYSGYQ |
| | AGZ48806) | PISAASGLPTGFNALKPIFKLPLGINITNFRTLLTAFP |
| | | PRPDYWGTSAAAYFVGYLKPTTFMLKYDENGTITDAVDCSQN |
| | | PLAELKCSVKSFEIDKGIYQTSNFRVAPSKEVVRFPNI |
| | | TNLCPFGEVFNATTFPSVYAWERKRISNCVADYSVLYNSTSFS |
| | | TFKCYGVSATKLNDLCFSNVYADSFVVKGDDVRQIAP |
| | | GQTGVIADYNYKLPDDFLGCVLAWNTNSKDSSTSGNYNYLYR |
| | | WVRRSKLNPYERDLSNDIYSPGGQSCSAVGPNCYNPLR |
| | | PYGFFTTAGVGHQPYRVVVLSFELLNAPATVCGPKLSTDLIKN |
| | | QCVNFNFNGLTGTGVLTPSSKRFQPFQQFGRDVSDFT |
| | | DSVRDPKTSEILDISPCSFGGVSVITPGTNTSSEVAVLYQDVNC |
| | | TDVPVAIHADQLTPSWRVYSTGNNVFQTQAGCLIGA |
| | | EHVDTSYECDIPIGAGICASYHTVSSLRSTSQKSIVAYTMSLGA |
| | | DSSIAYSNNTIAIPTNFSISITTEVMPVSMAKTSVD |
| | | CNMYICGDSTECANLLLQYGSFCTQLNRALSGIAVEQDRNTR |
| | | EVFAQVKQMYKTPTLKDFGGFNFSQILPDPLKPTKRSF |
| | | IEDLLFNKVTLADAGFMKQYGECLGDINARDLICAQKFNGLTVL |
| | | PPLLTDDMIAAYTAALVSGTATAGWTFGAGAALQIP |
| | | FAMQMAYRFNGIGVTQNVLYENQKQIANQFNKAISQIQESLTT |
| | | TSTALGKLQDVVNQNAQALNTLVKQLSSNFGAISSVL |
| | | NDILSRLDKVEAEVQIDRLITGRLQSLQTYVTQQLIRAAEIRASA |
| | | NLAATKMSECVLGQSKRVDFCGKGYHLMSFPQAAP |
| | | HGVVFLHVTYVPSQERNFTTAPAICHEGKAYFPREGVFVFNG |
| | | TSWFITQRNFFSPQIITTDNTFVSGSCDVVIGIINNTV |
| | | YDPLQPELDSFKEELDKYFKNHTSPDVDLGDISGINASVVNIQK |
| | | EIDRLNEVAKNLNESLIDLQELGKYEQYIKWPWYVW |
| | | LGFIAGLIAIVMVTILLCCMTSCCSCLKGACSCGSCCKFDEDDS |
| | | EPVLKGVKLHYT |
| 27 | Bat SARS-like | MKLLVLVFATLVSSYTIEKCLDFDDRTPPANTQFLSSHRGVYY |
| | coronavirus | PDDIFRSNVLHLVQDHFLPFDSNVTRFITFGLNFDNP |
| | Spike protein | IIPFRDGIYFAATEKSNVIRGWVFGSTMNNKSQSVIIMNNSTNL |
| | (Genbank: | VIRACNFELCDNPFFVVLKSNNTQIPSYIFNNAFNC |
| | ATO98132) | TFEYVSKDFNLDLGEKPGNFKDLREFVFRNKDGFLHVYSGYQ |
| | | PISAASGLPTGFNALKPIFKLPLGINITNFRTLLTAFP |
| | | PRPDYWGTSAAAYFVGYLKPTTFMLKYDENGTITDAVDCSQN |
| | | PLAELKCSVKSFEIDKGIYQTSNFRVAPSKEVVRFPNI |
| | | TNLCPFGEVFNATTFPSVYAWERKRISNCVADYSILYNSTSFS |
| | | TFKCYGVSATKLNDLCFSNVYADSFVVKGDDVRQIAP |
| | | GQTGVIADYNYKLPDDFLGCVLAWNTNSKDSSTSGNYNYLYR |
| | | WVRRSKLNPYERDLSNDIYSPGGQSCSAVGPNCYNPLR |
| | | PYGFFTTAGVGHQPYRVVVLSFELLNAPATVCGPKLSTDLIKN |
| | | QCVNFNFNGLTGTGVLTPSSKRFQPFQQFGRDVSDFT |
| | | DSVRDPKTSEILDISPCSFGGVSVITPGTNTSSEVAVLYQDVNC |
| | | TDVPVAIHADQLTPSWRVYSTGNNVFQTQAGCLIGA |
| | | EHVDTSYECDIPIGAGICASYHTVSSLRSTSQKSIVAYTMSLGA |
| | | DSSIAYSNNTIAIPTNFSISITTEVMPVSMAKTSVD |
| | | CNMYICGDSTECANLLLQYGSFCTQLNRALSGIAVEQDRNTR |
| | | EVFAQVKQMYKTPTLKDFGGFNFSQILPDPLKPTKRSF |
| | | IEDLLFNKVTLADAGFMKQYGECLGDINARDLICAQKFNGLTVL |
| | | PPLLTDDMIAAYTAALVSGTATAGWTFGAGAALQIP |
| | | FAMQMAYRFNGIGVTQNVLYENQKQIANQFNKAISQIQESLTT |
| | | TSTALGKLQDVVNQNAQALNTLVKQLSSNFGAISSVL |
| | | NDILSRLDKVEAEVQIDRLITGRLQSLQTYVTQQLIRAAEIRASA |
| | | NLAATKMSECVLGQSKRVDFCGKGYHLMSFPQAAP |
| | | HGVVFLHVTYVPSQERNFTTAPAICHEGKAYFPREGVFVFNG |
| | | TSWFITQRNFFSPQIITTDNTFVSGSCDVVIGIINNTV |
| | | YDPLQPELDSFKEELDKYFKNHTSPDVDLGDISGINASVVNIQK |
| | | EIDRLNEVAKNLNESLIDLQELGKYEQYIKWPWYVW |
| | | LGFIAGLIAIVMVTILLCCMTSCCSCLKGACSCGSCCKFDEDDS |
| | | EPVLKGVKLHYT |
| 28 | Bat SARS-like | MKLLVLVFATLVSSYTIEKCLDFDDRTPPANTQFLSSHRGVYY |
| | coronavirus | PDDIFRSNVLHLVQDHFLPFDSNVTRFITFGLNFDNP |
| | Rs3367 | IIPFKDGIYFAATEKSNVIRGWVFGSTMNNKSQSVIIMNNSTNL |
| | Spike protein | VIRACNFELCDNPFFVVLKSNNTQIPSYIFNNAFNC |
| | (Genbank: | TFEYVSKDFNLDLGEKPGNFKDLREFVFRNKDGFLHVYSGYQ |
| | AGZ48818) | PISAASGLPTGFNALKPIFKLPLGINITNFRTLLTAFP |
| | | PRPDYWGTSAAAYFVGYLKPTTFMLKYDENGTITDAVDCSQN |
| | | PLAELKCSVKSFEIDKGIYQTSNFRVAPSKEVVRFPNI |
| | | TNLCPFGEVFNATTFPSVYAWERKRISNCVADYSVLYNSTSFS |
| | | TFKCYGVSATKLNDLCFSNVYADSFVVKGDDVRQIAP |
| | | GQTGVIADYNYKLPDDFTGCVLAWNTRNIDATQTGNYNYKYR |
| | | SLRHGKLRPFERDISNVPFSPDGKPCTPPAFNCYWPLN |
| | | DYGFYITNGIGYQPYRVVVLSFELLNAPATVCGPKLSTDLIKNQ |
| | | CVNFNFNGLTGTGVLTPSSKRFQPFQQFGRDVSDFT |
| | | DSVRDPKTSEILDISPCSFGGVSVITPGTNTSSEVAVLYQDVNC |
| | | TDVPVAIHADQLTPSWRVYSTGNNVFQTQAGCLIGA |
| | | EHVDTSYECDIPIGAGICASYHTVSSLRSTSQKSIVAYTMSLGA |
| | | DSSIAYSNNTIAIPTNFSISITTEVMPVSMAKTSVD |
| | | CNMYICGDSTECANLLLQYGSFCTQLNRALSGIAVEQDRNTR |
| | | EVFAQVKQMYKTPTLKDFGGFNFSQILPDPLKPTKRSF |
| | | IEDLLFNKVTLADAGFMKQYGECLGDINARDLICAQKFNGLTVL |
| | | PPLLTDDMIAAYTAALVSGTATAGWTFGAGAALQIP |
| | | FAMQMAYRFNGIGVTQNVLYENQKQIANQFNKAISQIQESLTT |
| | | TSTALGKLQDVVNQNAQALNTLVKQLSSNFGAISSVL |
| | | NDILSRLDKVEAEVQIDRLITGRLQSLQTYVTQQLIRAAEIRASA |
| | | NLAATKMSECVLGQSKRVDFCGKGYHLMSFPQAAP |
| | | HGVVFLHVTYVPSQERNFTTAPAICHEGKAYFPREGVFVFNG |
| | | TSWFITQRNFFSPQIITTDNTFVSGSCDVVIGIINNTV |
| | | YDPLQPELDSFKEELDKYFKNHTSPDVDLGDISGINASVVNIQK |
| | | EINRLNEVAKNLNESLIDLQELGKYEQYIKWPWYVW |
| | | LGFIAGLIAIVMVTILLCCMTSCCSCLKGACSCGSCCKFDEDDS |
| | | EPVLKGVKLHYT |
| 29 | Bat SARS-like | MKLLVLVFATLVSSYTIEKCLDFDDRTPPANTQFLSSHRGVYY |
| | coronavirus | PDDIFRSNVLHLVQDHFLPFDSNVTRFITFGLNFDNP |
| | WIV1 | IIPFKDGIYFAATEKSNVIRGWVFGSTMNNKSQSVIIMNNSTNL |
| | Spike protein | VIRACNFELCDNPFFVVLKSNNTQIPSYIFNNAFNC |
| | (Genbank: | TFEYVSKDFNLDLGEKPGNFKDLREFVFRNKDGFLHVYSGYQ |
| | AGZ48828) | PISAASGLPTGFNALKPIFKLPLGINITNFRTLLTAFP |
| | | PRPDYWGTSAAAYFVGYLKPTTFMLKYDENGTITDAVDCSQN |
| | | PLAELKCSVKSFEIDKGIYQTSNFRVAPSKEVVRFPNI |
| | | TNLCPFGEVFNATTFPSVYAWERKRISNCVADYSVLYNSTSFS |
| | | TFKCYGVSATKLNDLCFSNVYADSFVVKGDDVRQIAP |
| | | GQTGVIADYNYKLPDDFTGCVLAWNTRNIDATQTGNYNYKYR |
| | | SLRHGKLRPFERDISNVPFSPDGKPCTPPAFNCYWPLN |
| | | DYGFYITNGIGYQPYRVVVLSFELLNAPATVCGPKLSTDLIKNQ |
| | | CVNFNFNGLTGTGVLTPSSKRFQPFQQFGRDVSDFT |
| | | DSVRDPKTSEILDISPCSFGGVSVITPGTNTSSEVAVLYQDVNC |
| | | TDVPVAIHADQLTPSWRVHSTGNNVFQTQAGCLIGA |
| | | EHVDTSYECDIPIGAGICASYHTVSSLRSTSQKSIVAYTMSLGA |
| | | DSSIAYSNNTIAIPTNFSISITTEVMPVSMAKTSVD |
| | | CNMYICGDSTECANLLLQYGSFCTQLNRALSGIAVEQDRNTR |
| | | EVFAQVKQMYKTPTLKDFGGFNFSQILPDPLKPTKRSF |
| | | IEDLLFNKVTLADAGFMKQYGECLGDINARDLICAQKFNGLTVL |
| | | PPLLTDDMIAAYTAALVSGTATAGWTFGAGAALQIP |
| | | FAMQMAYRFNGIGVTQNVLYENQKQIANQFNKAISQIQESLTT |
| | | TSTALGKLQDVVNQNAQALNTLVKQLSSNFGAISSVL |
| | | NDILSRLDKVEAEVQIDRLITGRLQSLQTYVTQQLIRAAEIRASA |
| | | NLAATKMSECVLGQSKRVDFCGKGYHLMSFPQAAP |
| | | HGVVFLHVTYVPSQERNFTTAPAICHEGKAYFPREGVFVFNG |
| | | TSWFITQRNFFSPQIITTDNTFVSGSCDVVIGIINNTV |
| | | YDPLQPELDSFKEELDKYFKNHTSPDVDLGDISGINASVVNIQK |
| | | EIDRLNEVAKNLNESLIDLQELGKYEQYIKWPWYVW |
| | | LGFIAGLIAIVMVTILLCCMTSCCSCLKGACSCGSCCKFDEDDS |
| | | EPVLKGVKLHYT |
| 30 | SARS | MFIFLLFLTLTSGSDLDRCTTFDDVQAPNYTQHTSSMRGVYYP |
| | coronavirus | DEIFRSDTLYLTQDLFLPFYSNVTGFHTINHTFGNPV |
| | Tor2 | IPFKDGIYFAATEKSNVVRGWVFGSTMNNKSQSVIIINNSTNVV |
| | Spike | IRACNFELCDNPFFAVSKPMGTQTHTMIFDNAFNCT |
| | glycoprotein | FEYISDAFSLDVSEKSGNFKHLREFVFKNKDGFLYVYKGYQPI |
| | (Genbank: | DVVRDLPSGFNTLKPIFKLPLGINITNFRAILTAFSP |
| | YP_009825051) | AQDIWGTSAAAYFVGYLKPTTFMLKYDENGTITDAVDCSQNPL |
| | | AELKCSVKSFEIDKGIYQTSNFRVVPSGDVVRFPNIT |
| | | NLCPFGEVFNATKFPSVYAWERKKISNCVADYSVLYNSTFFST |
| | | FKCYGVSATKLNDLCFSNVYADSFVVKGDDVRQIAPG |
| | | QTGVIADYNYKLPDDFMGCVLAWNTRNIDATSTGNYNYKYRY |
| | | LRHGKLRPFERDISNVPFSPDGKPCTPPALNCYWPLND |
| | | YGFYTTTGIGYQPYRVVVLSFELLNAPATVCGPKLSTDLIKNQC |
| | | VNFNFNGLTGTGVLTPSSKRFQPFQQFGRDVSDFTD |
| | | SVRDPKTSEILDISPCAFGGVSVITPGTNASSEVAVLYQDVNCT |
| | | DVSTAIHADQLTPAWRIYSTGNNVFQTQAGCLIGAE |
| | | HVDTSYECDIPIGAGICASYHTVSLLRSTSQKSIVAYTMSLGAD |
| | | SSIAYSNNTIAIPTNFSISITTEVMPVSMAKTSVDC |
| | | NMYICGDSTECANLLLQYGSFCTQLNRALSGIAAEQDRNTREV |
| | | FAQVKQMYKTPTLKYFGGFNFSQILPDPLKPTKRSFI |
| | | EDLLFNKVTLADAGFMKQYGECLGDINARDLICAQKFNGLTVL |
| | | PPLLTDDMIAAYTAALVSGTATAGWTFGAGAALQIPF |
| | | AMQMAYRFNGIGVTQNVLYENQKQIANQFNKAISQIQESLTTT |
| | | STALGKLQDVVNQNAQALNTLVKQLSSNFGAISSVLN |
| | | DILSRLDKVEAEVQIDRLITGRLQSLQTYVTQQLIRAAEIRASAN |
| | | LAATKMSECVLGQSKRVDFCGKGYHLMSFPQAAPH |
| | | GVVFLHVTYVPSQERNFTTAPAICHEGKAYFPREGVFVFNGTS |
| | | WFITQRNFFSPQIITTDNTFVSGNCDVVIGIINNTVY |
| | | DPLQPELDSFKEELDKYFKNHTSPDVDLGDISGINASVVNIQKE |
| | | IDRLNEVAKNLNESLIDLQELGKYEQYIKWPWYVWL |
| | | GFIAGLIAIVMVTILLCCMTSCCSCLKGACSCGSCCKFDEDDSE |
| | | PVLKGVKLHYT |
| 31 | Bat SARS-like | MFIFLFFLTLTSGSDLESCTTFDDVQAPNYPQHSSSRRGVYYP |
| | coronavirus | DEIFRSDTLYLTQDLFLPFYSNVTGFHTINHRFDNPV |
| | Spike protein | IPFKDGVYFAATEKSNVVRGWVFGSTMNNKSQSVIIINNSTNV |
| | (Genbank: | VIRACNFELCDNPFFAVSKPTGTQTHTMIFDNAFNCT |
| | ATO98157) | FEYISDSFSLDVAEKSGNFKHLREFVFKNKDGFLYVYKGYQPI |
| | | DVVRDLPSGFNILKPIFKLPLGINITNFRAILTAFLP |
| | | AQDTWGTSAAAYFVGYLKPATFMLKYDENGTITDAVDCSQNP |
| | | LAELKCSVKSFEIDKGIYQTSNFRVAPSKEVVRFPNIT |
| | | NLCPFGEVFNATTFPSVYAWERKRISNCVADYSVLYNSTSFST |
| | | FKCYGVSATKLNDLCFSNVYADSFVVKGDDVRQIAPG |
| | | QTGVIADYNYKLPDDFLGCVLAWNTNSKDSSTSGNYNYLYRW |
| | | VRRSKLNPYERDLSNDIYSPGGQSCSAIGPNCYNPLRP |
| | | YGFFTTAGVGHQPYRVVVLSFELLNAPATVCGPKLSTDLIKNQ |
| | | CVNFNFNGLTGTGVLTSSSKRFQPFQQFGRDVSDFTD |
| | | SVRDPKTSEILDISPCSFGGVSVITPGTNTSSEVAVLYQDVNCT |
| | | DVPVAIHADQLTPAWRIYSTGNNVFQTQAGCLIGAE |
| | | HVDTSYECDIPIGAGICASYHTVSSLRSTSQKSIVAYTMSLGAD |
| | | SSIAYSNNTIAIPTNFSISITTEVMPVSMAKTSVDC |
| | | NMYICGDSTECANLLLQYGSFCTQLNRALSGIAVEQDRNTREV |
| | | FAQVKQMYKTPALKDFGGFNFSQILPDPLKPTKRSFI |
| | | EDLLFNKVTLADAGFMKQYGECLGDVNARDLICAQKFNGLTVL |
| | | PPLLTDDMIAAYTAALVSGTATAGWTFGAGAALQIPF |
| | | AMQMAYRFNGIGVTQNVLYENQKQIANQFNKAISQIQESLTTT |
| | | STALGKLQDVVNQNAQALNTLVKQLSSNFGAISSVLN |
| | | DILSRLDKVEAEVQIDRLITGRLQSLQTYVTQQLIRAAEIRASAN |
| | | LAATKMSECVLGQSKRVDFCGKGYHLMSFPQAAPH |
| | | GVVFLHVTCVPSQERNFTTAPAICHEGKAYFPREGVFVFNGT |
| | | SWFITQRNFFSPQIITTDNTFVSGSCDVVIGIINNTVY |
| | | DPLQPELDSFKEELDKYFKNHTSPDVDLGDISGINASVVNIQKE |
| | | IDRLNEVAKNLNESLIDLQELGKYEQYIKWPWYVWL |
| | | GFIAGLIAIVMVTILLCCMTSCCSCLKGACSCGSCCKFDEDDSE |
| | | PVLKGVKLHYT |
| 32 | SARS-like | MFIFLFFLTLTSGSDLESCTTFDDVQAPNYPQHSSSRRGVYYP |
| | coronavirus | DEIFRSDTLYLTQDLFLPFYSNVTGFHTINHRFDNPV |
| | WIV16 | IPFKDGVYFAATEKSNVVRGWVFGSTMNNKSQSVIIINNSTNV |
| | Spike protein | VIRACNFELCDNPFFAVSKPTGTQTHTMIFDNAFNCT |
| | (Genbank: | FEYISDSFSLDVAEKSGNFKHLREFVFKNKDGFLYVYKGYQPI |
| | ALK02457) | DVVRDLPSGFNILKPIFKLPLGINITNFRAILTAFLP |
| | | AQDTWGTSAAAYFVGYLKPATFMLKYDENGTITDAVDCSQNP |
| | | LAELKCSVKSFEIDKGIYQTSNFRVAPSKEVVRFPNIT |
| | | NLCPFGEVFNATTFPSVYAWERKRISNCVADYSVLYNSTSFST |
| | | FKCYGVSATKLNDLCFSNVYADSFVVKGDDVRQIAPG |
| | | QTGVIADYNYKLPDDFTGCVLAWNTRNIDATQTGNYNYKYRS |
| | | LRHGKLRPFERDISNVPFSPDGKPCTPPAFNCYWPLND |
| | | YGFYITNGIGYQPYRVVVLSFELLNAPATVCGPKLSTDLIKNQC |
| | | VNFNFNGLTGTGVLTPSSKRFQPFQQFGRDVLDFTD |
| | | SVRDPKTSEILDISPCSFGGVSVITPGTNTSSEVAVLYQDVNCT |
| | | DVPVAIHADQLTPSWRVYSTGNNVFQTQAGCLIGAE |
| | | HVDTSYECDIPIGAGICASYHTVSSLRSTSQKSIVAYTMSLGAD |
| | | SSIAYSNNTIAIPTNFSISITTEVMPVSMAKTSVDC |
| | | NMYICGDSTECANLLLQYGSFCTQLNRALSGIAVEQDRNTREV |
| | | FAQVKQMYKTPTLKDFGGFNFSQILPDPLKPTKRSFI |
| | | EDLLFNKVTLADAGFMKQYGECLGDINARDLICAQKFNGLTVL |
| | | PPLLTDDMIAAYTAALVSGTATAGWTFGAGAALQIPF |
| | | AMQMAYRFNGIGVTQNVLYENQKQIANQFNKAISQIQESLTTT |
| | | STALGKLQDVVNQNAQALNTLVKQLSSNFGAISSVLN |
| | | DILSRLDKVEAEVQIDRLITGRLQSLQTYVTQQLIRAAEIRASAN |
| | | LAATKMSECVLGQSKRVDFCGKGYHLMSFPQAAPH |
| | | GVVFLHVTYVPSQERNFTTAPAICHEGKAYFPREGVFVFNGTS |
| | | WFITQRNFFSPQIITTDNTFVSGSCDVVIGIINNTVY |
| | | DPLQPELDSFKEELDKYFKNHTSPDVDLGDISGINASVVNIQKE |
| | | IDRLNEVAKNLNESLIDLQELGKYEQYIKWPWYVWL |
| | | GFIAGLIAIVMVTILLCCMTSCCSCLKGACSCGSCCKFDEDDSE |
| | | PVLKGVKLHYT |
| 33 | Bat SARS-like | MFIFLFFLTLTSGSDLESCTTFDDVQAPNYPQHSSSRRGVYYP |
| | coronavirus | DEIFRSDTLYLTQDLFLPFYSNVTGFHTINHRFDNPV |
| | Spike protein | IPFKDGVYFAATEKSNVVRGWVFGSTMNNKSQSVIIINNSTNV |
| | (Genbank: | VIRACNFELCDNPFFAVSKPTGTQTHTMIFDNAFNCT |
| | ATO98205) | FEYISDSFSLDVAEKSGNFKHLREFVFKNKDGFLYVYKGYQPI |
| | | DVVRDLPSGFNILKPIFKLPLGINITNFRAILTAFLP |
| | | AQDTWGTSAAAYFVGYLKPATFMLKYDENGTITDAVDCSQNP |
| | | LAELKCSVKSFEIDKGIYQTSNFRVAPSKEVVRFPNIT |
| | | NLCPFGEVFNATTFPSVYAWERKRISNCVADYSVLYNSTSFST |
| | | FKCYGVSATKLNDLCFSNVYADSFVVKGDDVRQIAPG |
| | | QTGVIADYNYKLPDDFTGCVLAWNTRNIDATQTGNYNYKYRS |
| | | LRHGKLRPFERDISNVPFSPDGKPCTPPAFNCYWPLND |
| | | YGFYITNGIGYQPYRVVVLSFELLNAPATVCGPKLSTDLIKNQC |
| | | VNFNFNGLTGTGVLTPSSKRFQPFQQFGRDVSDFTD |
| | | SVRDPKTSEILDISPCSFGGVSVITPGTNTSSEVAVLYQDVNCT |
| | | DVPVAIHADQLTPSWRVYSTGNNVFQTQAGCLIGAE |
| | | HVDTSYECDIPIGAGICASYHTVSSLRSTSQKSIVAYTMSLGAD |
| | | SSIAYSNNTIAIPTNFSISITTEVMPVSMAKTSVDC |
| | | NMYICGDSTECANLLLQYGSFCTQLNRALSGIAVEQDRNTREV |
| | | FAQVKQMYKTPTLKDFGGFNFSQILPDPLKPTKRSFI |
| | | EDLLFNKVTLADAGFMKQYGECLGDINARDLICAQKFNGLTVL |
| | | PPLLTDDMIAAYTAALVSGTATAGWTFGAGAALQIPF |
| | | AMQMAYRFNGIGVTQNVLYENQKQIANQFNKAISQIQESLTTT |
| | | STALGKLQDVVNQNAQALNTLVKQLSSNFGAISSVLN |
| | | DILSRLDKVEAEVQIDRLITGRLQSLQTYVTQQLIRAAEIRASAN |
| | | LAATKMSECVLGQSKRVDFCGKGYHLMSFPQAAPH |
| | | GVVFLHVTYVPSQERNFTTAPAICHEGKAYFPREGVFVFNGTS |
| | | WFITQRNFFSPQIITTDNTFVSGSCDVVIGIINNTVY |
| | | DPLQPELDSFKEELDKYFKNHTSPDVDLGDISGINASVVNIQKE |
| | | IDRLNEVAKNLNESLIDLQELGKYEQYIKWPWYVWL |
| | | GFIAGLIAIVMVTILLCCMTSCCSCLKGACSCGSCCKFDEDDSE |
| | | PVLKGVKLHYT |
| 34 | Rhinolophus | MFLTCFILSFSLFCVSGDSIDTCETFDDVSPPQQNLVSSSKRG |
| | affinis | VYYPDDIYRSDVHHLVQDLFLPFNSNVVGLMSFNYRF |
| | coronavirus | DNPIIPFKDGVYFAATEKSNVVRGWVFGSTMNNKSQSVIIMNN |
| | Spike protein | STNVVIRACNFQLCDNPFFAVIRPTSQQIETILFENA |
| | (Genbank: | FNCTFEYVSDSFLMDVGEKPGNFKHLREFIFKNKDGFLNIYSG |
| | AHX37558) | FQNIDVANGLPSGFSLLKPLLKLPLGLNITNFRVLLT |
| | | AFIPNIGTWGTSPVAYFVGYLKPTTFMLKYDYNGTIVDAVDCS |
| | | QHPLAELKCSVKSFEIDKGIYQTSNFRVSPSKEVVRF |
| | | PNITNLCPFGEVFNATTFPSVYAWERKRISNCVADYSVLYNST |
| | | SFSTFKCYGVSAIKLNDLCFSNVYADSFVVKGDDVRQ |
| | | IAPGQTGVIADYNYKLPDDFMGCVLAWNTRNIDATSSGNFNYK |
| | | YRSLRHGKLRPFERDISNVPFSPDGKPCTPPAFNCYW |
| | | PLNDYGFYTTNGIGYQPYRVVVLSFELLNAPATVCGPKLSTDLI |
| | | TNQCVNFNFNGLTGTGVLTPSLKRFQPFQQFGRDFS |
| | | DFTDSVRDPKTLEVLDISPCSFGGVSVITPGTNISSEVAVLYQD |
| | | VNCTDVPTAIHADQLTPAWRIYSAGVNVFQTQAGCL |
| | | IGAEHVNASYECDIPIGAGICASYHTASLLRNTDQKSIVAYTMS |
| | | LGAENSIAYANNSIAIPTNFSISITTEVMPVSMAKT |
| | | SVDCTMYICGDSQECSNLLLQYGSFCTQLNRALSGIAVEQDK |
| | | NTQEVFAQVKQIYKTPAIKDFGGFNFSQILPDPSKPTK |
| | | RSFIEDLLFNKVTLADAGFMKQYGECLGDISARDLICAQKFNGL |
| | | TVLPPLLTDEMIAAYTAALVSGTATAGWTFGAGAAL |
| | | QIPFAMQMAYRFNGIGVTQNVLYENQKQIANQFNKAISQIQES |
| | | LTTTSTALGKLQDVVNQNAQALNTLVKQLSSNFGAIS |
| | | SVLNDILSRLDKVEAEVQIDRLITGRLQSLQTYVTQQLIRAAEIR |
| | | ASANLAATKMSECVLGQSKRVDFCGKGYHLMSFPQ |
| | | AAPHGVVFLHVTYVPSQERNFTTAPAICHEGKAYFPREGVFVS |
| | | NGTSWFITQRNFFSPQLITTDNTFVSGNCDVVIGIIN |
| | | NTVYDPLQPELDSFKEELDKYFKNHTSPDVDLGDISRINASVV |
| | | NIQKEIDRLNEVAKNLNESLIDLQELGKYEQYIKWPW |
| | | YVWLGFIAGLIAIVMATILLCCMTSCCSCLKGACSCGSCCKFDE |
| | | DDSEPVLKGVKLHYT |
| 35 | Rhinolophus | MFLTCFILIFSLFCVSGDSIDTCETFDDVSPPQQNLVSSSKRGV |
| | affinis | YYPDDIYRSDAHHLVQDLFLPFNSNVVGLMSFNYRF |
| | coronavirus | DNPIIPFKDGVYFAATEKSNVVRGWVFGSTMNNKSQSAIIMNN |
| | Spike protein | STNVVIRACNFQLCDNPFFAVIRPTSQQIETILFENA |
| | (Genbank: | FNCTFEYVSDSFLMDVGEKPGNFKHLREFIFKNKDGFLYIYSG |
| | AHX37569) | FQNIDVANGLPSGFSLLKPLLKLPLGLNITNFRVLLT |
| | | AFIPNIGTWGTSPVAYFVGYLKPTTFMLKYDYNGTIVDAVDCS |
| | | QHPLAELKCSVKSFDIDKGIYQTSNFRVSPSREVVRF |
| | | PNITNLCPFGEVFNATTFPSVYAWERKRISNCVADYSVLYNST |
| | | SFSTFKCYGVSAIKLNDLCFSNVYADSFVVKGDDVRQ |
| | | IAPGQTGVIADYNYKLPDDFMGCVLAWNTRNIDATSSGNFHYK |
| | | YRSLRHGKLRPFERDISNVPFSPDGKPCTPPAFNCYW |
| | | PLNDYGFYTTNGIGYQPYRVVVLSFELLNAPATVCGPKLSTDLI |
| | | TNQCVNFNFNGLTGTGVLTPSSKRFQPFQQFGRDVS |
| | | DFTDSVRDPKTLEVLDISPCSFGGVSVITPGTNISSEVAVLYQD |
| | | VNCTDVPTAIHADQLTPAWRIYSAGENVFQTQAGCL |
| | | IGAEHVNASYECDIPIGAGICASYHTASLLRNTGQKSIVAYTMS |
| | | LGAENSIAYANNSIAIPTNFSISITTEVMPVSMAKT |
| | | SVDCTMYICGDSQECSNLLLQYGSFCTQLNRALSGIAVEQDS |
| | | NTQEVFAQVKQIYKTPAIKDFGGFNFSQILPDPSKPTK |
| | | RSFIEDLLFNKVTLADAGFMKQYGECLGDISARDLICAQKFNGL |
| | | TVLPPLLTDEMIAAYTAALVSGTATAGWTFGAGAAL |
| | | QIPFAMQMAYRFNGIGVTQNVLYENQKQIANQFNKAISQIQES |
| | | LTTTSTALGKLQDVVNQNAQALNTLVKQLSSNFGAIS |
| | | SVLNDILSRLDKVEAEVQIDRLITGRLQSLQTYVTQQLIRAAEIR |
| | | ASANLAATKMSECVLGQSKRVDFCGKGYHLMSFPQ |
| | | AAPHGVVFLHVTYVPSQERNFTTAPAICHEGKAYFPREGVFVF |
| | | NGTSWFITQRNFFSPQLITTDNTFVSGNCDVVIGIIN |
| | | NTVYDPLQPELDSFKEELDKYFKNHTSPDVDLGDISRINASVV |
| | | NIQKEIDRLNEVAKNLNESLIDLQELGKYEQYIKWPW |
| | | YVWLGFIAGLIAIVMATILLCCMTSCCSCLKGACSCGSCCKFDE |
| | | DDSEPVLKGVKLHYT |
| 36 | SARS-related | MKFFILLSLLSFTTAQEGCGILSNKSNPALTQYFSSRRGFYYFD |
| | coronavirus | DTFRSSVRVLTTGYFLPFNSNLTGYSSRNSVTGRLI |
| | Spike protein | QFDNPNIPFKDGLYFAATERSNVIRGWIFGSTLDNTTQSAVLF |
| | (Genbank: | NNGTHIVINVCNFYFCQDPMLAVANGSHFKSWVFLNA |
| | APO40579) | TNCTYNRVHGFEIDPSPNTGSFIHLREHVFRNVDGFLYVYHNY |
| | | ERVDVYDNFPQGFSVLKPIFKLPFGLNITQFKVIMTL |
| | | FSPTTSSFNADASVYFVGHLKPLTMLAEFDENGTITDAVDCSQ |
| | | DPLSELKCTTKSLTVEKGIYQTSNFRVSPSTEVVRFP |
| | | NITNLCPFGQVFNASNFPSVYAWERLRISDCVADYAVLYNSSS |
| | | SFSTFKCYGVSPTKLNDLCFSSVYADYFVVKGDDVRQ |
| | | IAPAQTGVIADYNYKLPDDFTGCVLAWNTNSVDSKSGNNFYY |
| | | RLFRHGKIKPYERDISNVLYNSAGGTCSSISQLGCYEP |
| | | LKSYGFTPTVGVGYQPYRVVVLSFELLNAPATVCGPKKSTELV |
| | | KNKCVNFNFNGLTGTGVLTSSTKKFQPFQQFGRDVSD |
| | | FTDSVRDPKTFEILDISPCSYGGVSVITPGTNTSKAVAVLYQDV |
| | | NCTDVPTMIHVEQVSSDWRVYAFNSYGNMFQTQAGC |
| | | LVGAIYENTTYECDIPIGAGICAKFGSDKIRMGQESIVAYTMSIG |
| | | EDQSIAYSNNIIAIPTNFSISVTTEVLPVSMTKTS |
| | | VDCNMYICGDSTECSNLLLQYGSFCTQLNRALSGIAVEQDRN |
| | | TRDVFAQTKSIYKTPNIKDFGGFNFSQILPDPKKLSYR |
| | | SFIEDLLYNKVTLSDPGFMKQYGDCLGGINARDLICAQKFNGL |
| | | TVLPPLLTDDMIAAYTAALISGTATAGYTFGAGAALQ |
| | | IPFAMQMAYRFNGIGVTQNVLYENQKQIANQFNNAISKIQDSLT |
| | | TTSAALGKLQDVINQNAVALNTLVKQLSSNFGAISS |
| | | VLNDILSRLDKVEAEVQIDRLITGRLQSLQTYVTQQLIRAAEIRA |
| | | SANLAATKMSECVLGQSKRVDFCGKGYHLMSFPQA |
| | | APHGVVFLHVTYVPSQQQNFTTAPAICHNGKAYFPREGVFVM |
| | | NGTHWFITQRNFYSPQVITTDNTFESGSCDVVIGIINN |
| | | TVYDPLQPELESFKQELDKYFKNHTSPDVDFGDISGINASVVDI |
| | | KKEIAHLNEIAKNLNESLIDLQELGKYEQYVKWPWY |
| | | VWLGFVAGIVAILMSVIMLCCMTNCCSCFKGMCSCGSCCKFD |
| | | EDHSEPVSGVKLHYT |
| 37 | SARS-like | MKVLIFLSLLSLVSAQDGCDRFSSKKTPLLTQFPSSKRGLYYF |
| | coronavirus | DDIFRSSTRVLTSGHFLPFNSNVTRYTTQHSAPGEWM |
| | BatCoV/BB9904/ | IYFDNPNITFGDGVYFGAAERSNALRGWIFGSTMDNTTQSAIL |
| | BGR/2008 | YNNGTHIVISVCNFNLCEQPMIKVFAGRSYRSLIYTN |
| | Spike | AANCTYQRVHAFNITTATGNGNLIHFREHVFRNVDGFLYVYHN |
| | glycoprotein | YELVNLSHTNPSFPAGFSVLKPIFKLPFGLNITFVRA |
| | (Genbank: | IMTVFSASTSQFEADYSAYFVGHLKPLTMLVDFDENGTITDAV |
| | ALJ94036) | DCSQDPLSELKCTTKSFTVEKGIYQTSNFRVTPTTEV |
| | | VRFPNITKLCPFDQVFNASSFPSVYAWERVRITDCVANYAVLY |
| | | NSSVSFSTFQCYGVSPTKLNDLCFSSVYADYFIVKGD |
| | | DVRQIAPSQTGVIADYNYKLPDDFTGCVIAWNTNALDSNKDFY |
| | | YRLFRHGKIKPYGRDLSNIPYSPSGTCSTINNLNCFA |
| | | PLKSYGFTQSSGISFQPYRVVVLSFELLNAPATVCGPKQSTEL |
| | | VKDKCVNFNFNGLTGTGVLTSSSKKFQPFQQFGRDVS |
| | | DFTDSVRDPKTLEILDIAPCSYGGVSVITPGTNASNSVAVLYQD |
| | | VNCTDVPTMLHAEQISHDWRVYTFSSDSNIYQTQAG |
| | | CLIGAAYDNSSYECDIPIGAGICAKYGISSNTRLRSNSQSIVAYT |
| | | MSLGEDQSIAYSNNTIAIPMNFSISVTTEVLPVSM |
| | | TKTSVDCNMYICGDSTECSNLLLQYGSFCTQLNRALAGIAVEQ |
| | | DRNTRDVFAQTKAMYKTPSLKDFGGFNFSQILPDPAK |
| | | PSSRSFIEDLLYNKVTLADPGFMKQYGDCLGGVNARDLICAQK |
| | | FNGLTVLPPLLTDEMIAAYTAALVSGTATAGFTFGAG |
| | | AALQIPFAMQMAYRFNGIGVTQNVLYENQKQIANQFNKAISQI |
| | | QDSLSTTTTALGKLQDVINQNAIALNTLVKQLSSNFG |
| | | AISSVLNDILSRLDKVEAEVQIDRLITGRLQSLQTYVTQQLIRAA |
| | | EIRASANIAATKMSECVLGQSKRVDFCGKGYHLMS |
| | | FPQAAPHGVVFLHVTYVPSQEQNFTTAPAICHGGKAHFPREG |
| | | VFVTNGTHWFITQRNFYSPQPITTDNTFVSGNCDVVIG |
| | | IVNNTVYDPLQPELESFKEELDKYFKNHTSQNVSLDGLNNINA |
| | | SVVDIKKEIEHLNEIAKSLNESLIDLQELGKYEQYIK |
| | | WPWYVWLGFIAGLIAIVMATIMLCCMTSCCSCLKGVCSCASC |
| | | CKFDEDHSEPVLTGVKLHYT |
| 38 | Bat | MKFLAFLCLLGFANAQDGKCGTLSNKSPSKLTQTPSSRRGFY |
| | coronavirus | YFDDIFRSSIRVLTTGHFLPFNTNLTWYLTLKSNGKQR |
| | BM48- | IYYDNPNINFGDGVYFGLTEKSNVFRGWIFGSTLDNTTQSAVL |
| | 31/BGR/2008 | FNNGTHIVIDVCNFNFCADPMFAVNSGQPYKTWIYTS |
| | Spike protein | AANCTYHRAHAFNISTNMNPGKFKHFREHLFKNVDGFLYVYH |
| | (Genbank: | NYEPIDLNSGFPSGFSVLKPILKLPFGLNITYVKAIMT |
| | YP_003858584) | LFSSTQSNFDADASAYFVGHLKPLTMLVDFDENGTIIDAIDCSQ |
| | | DPLSELKCTTKSFTVEKGIYQTSNFRVTPTTEVVRF |
| | | PNITQLCPFNEVFNITSFPSVYAWERMRITNCVADYSVLYNSS |
| | | ASFSTFQCYGVSPTKLNDLCFSSVYADYFVVKGDDVR |
| | | QIAPAQTGVIADYNYKLPDDFTGCVIAWNTNSLDSSNEFFYRR |
| | | FRHGKIKPYGRDLSNVLFNPSGGTCSAEGLNCYKPLA |
| | | SYGFTQSSGIGFQPYRVVVLSFELLNAPATVCGPKQSTELVKN |
| | | KCVNFNFNGLTGTGVLTNSTKKFQPFQQFGRDVSDFT |
| | | DSVRDPKTLEILDIAPCSYGGVSVITPGTNASSSVAVLYQDVNC |
| | | TDVPTMLHADQISHDWRVYAFRNDGNIFQTQAGCLI |
| | | GAAYDNSSYECDIPIGAGICAKYTNVSSTLVRSGGHSILAYTMS |
| | | LGDNQDIVYSNNTIAIPMNFSISVTTEVLPVSMTKT |
| | | SVDCNMYICGDSTECSNLLLQYGSFCTQLNRALAGIAVEQDR |
| | | NTRDVFAQTKAMYKTPSLKDFGGFNFSQILPDPAKPSS |
| | | RSFIEDLLYNKVTLADPGFMKQYGDCLGGVNARDLICAQKFN |
| | | GLTVLPPLLTDEMIAAYTAALISGTATAGFTFGAGAAL |
| | | QIPFAMQMAYRFNGIGVTQNVLYENQKQIANQFNKAISQIQDS |
| | | LSTTTTALGKLQDVINQNAIALNTLVKQLSSNFGAIS |
| | | SVLNDILSRLDKVEAEVQIDRLITGRLQSLQTYVTQQLIRAAEIR |
| | | ASANLAATKMSECVLGQSKRVDFCGKGYHLMSFPQ |
| | | AAPHGVVFLHVTYVPSQEQNFTTAPAICHEGKAHFPREGVFV |
| | | TNGTHWFITQRNFYSPQPITTDNTFVSGNCDVVIGIVN |
| | | NTVYDPLQPELDSFKEELDKYFKNHTSQNVSLDGLNNINASVV |
| | | DIKKEIEHLNEIAKSLNESLIDLQELGKYEQYIKWPW |
| | | YVWLGFIAGLIAIVMATIMLCCMTSCCSCLKGVCSCASCCKFD |
| | | EDHSEPVLTGVKLHYT |
| 39 | Pangolin | MLFFFFLHFALVNSQCVNLTGRAAIQPSFTNSSQRGVYYPDTI |
| | coronavirus | FRSNTLVLSQGYFLPFYSNVSWYYALTKTNSAEKRVD |
| | Surface | NPVLDFKDGIYFAATEKSNIVRGWIFGTTLDNTSQSLLIVNNAT |
| | glycoprotein | NVIIKVCNFQFCYDPYLSGYYHNNKTWSTREFAVYS |
| | (Genbank: | SYANCTFEYVSKSFMLDIAGKSGLFDTLREFVFRNVDGYFKIY |
| | QLR06867) | SKYTPVNVNSNLPIGFSALEPLVEIPAGINITKFRTL |
| | | LTIHRGDPMPNNGWTVFSAAYYVGYLAPRTFMLNYNENGTIT |
| | | DAVDCALDPLSEAKCTLKSLTVEKGIYQTSNFRVQPTE |
| | | SIVRFPNITNLCPFGEVFNATTFASVYAWNRKRISNCVADYSVL |
| | | YNSTSFSTFKCYGVSPTKLNDLCFTNVYADSFVVRG |
| | | DEVRQIAPGQTGRIADYNYKLPDDFTGCVIAWNSNNLDSKVG |
| | | GNYNYLYRLFRKSNLKPFERDISTEIYQAGSTPCNGVE |
| | | GFNCYFPLQSYGFHPTNGVGYQPYRVVVLSFELLNAPATVCG |
| | | PKQSTNLVKNKCVNFNFNGLTGTGVLTESSKKFLPFQQ |
| | | FGRDIADTTDAVRDPQTLEILDITPCSFGGVSVITPGTNTSNQV |
| | | AVLYQDVNCTEVPVAIHADQLTPTWSVYSTGSNVFQ |
| | | TRAGCLIGAEHVNNSYECDIPIGAGICASYQTQTNSRSVSSQAI |
| | | IAYTMSLGAENSVAYANNSIAIPTNFTISVTTEILP |
| | | VSMTKTSVDCTMYICGDSIECSNLLLQYGSFCTQLNRALTGIA |
| | | VEQDKNTQEVFAQVKQIYKTPPIKDFGGFNFSQILPD |
| | | PSKPSKRSFIEDLLFNKVTLADAGFIKQYGDCLGDIAARDLICA |
| | | QKFNGLTVLPPLLTDEMIAQYTSALLAGTITSGWTF |
| | | GAGAALQIPFAMQMAYRFNGIGVTQNVLYENQKLIANQFNSAI |
| | | GKIQDSLSSTASALGKLQDVVNQNAQALNTLVKQLSS |
| | | NFGAISSVLNDILSRLDKVEAEVQIDRLITGRLQSLQTYVTQQLI |
| | | RAAEIRASANLAATKMSECVLGQSKRVDFCGKGYH |
| | | LMSFPQSAPHGVVFLHVTYVPSQEKNFTTTPAICHEGKAHFPR |
| | | EGVFVSNGTHWFVTQRNFYEPQIITTDNTFVSGSCDV |
| | | VIGIVNNTVYDPLQPELDSFKEELDKYFKNHTSPDVDLGDISGI |
| | | NASVVNIQKEIDRLNEVAKNLNESLIDLQELGKYEQ |
| | | YIKWPWYIWLGFIAGLIAIIMVTIMLCCMTSCCSCLKGCCSCGS |
| | | CCKFDEDDSEPVLKGVKLHYT |
| 40 | Pangolin | MLFFFFLHFALVNSQCVNLTGRAAIQPSFTNSSQRGVYYPDTI |
| | coronavirus | FRSNTLVLSQGYFLPFYSNVSWYYALTKTNSAEKRVD |
| | Surface | NPVLDFKDGIYFAATEKSNIVRGWIFGTTLDNTSQSLLIVNNAT |
| | glycoprotein | NVIIKVCNFQFCYDPYLSGYYHNNKTWSTREFAVYS |
| | (Genbank: | SYANCTFEYVSKSFMLDIAGKSGLFDTLREFVFRNVDGYFKIY |
| | QLR06864) | SKYTPVNVNSNLPIGFSALEPLVEIPAGINITKFRTL |
| | | LTIHRGDPMPNNGWTVFSAAYYVGYLAPRTFMLNYNENGTIT |
| | | DAVDCALDPLSEAKCTLKSLTVEKGIYQTSNFRVQPTE |
| | | SIVRFPNITNLCPFGEVFNATTFASVYAWNRKRISNCVADYSVL |
| | | YNSTSFSTFKCYGVSPTKLNDLCFTNVYADSFVVRG |
| | | DEVRQIAPGQTGRIADYNYKLPDDFTGCVIAWNSNNLDSKVG |
| | | GNYNYLYRLFRKSNLKPFERDISTEIYQAGSTPCNGVE |
| | | GFNCYFPLQSYGFHPTNGVGYQPYRVVVLSFELLNAPATVCG |
| | | PKQSTNLVKNKCVNFNFNGLTGTGVLTESSKKFLPFQQ |
| | | FGRDIADTTDAVRDPQTLEILDITPCSFGGVSVITPGTNTSNQV |
| | | AVLYQDVNCTEVPVAIHADQLTPTWRVYSTGSNVFQ |
| | | TRAGCLIGAEHVNNTYECDIPIGAGICASYQTQTNSRSVSSQAI |
| | | IAYTMSLGAENSVAYANNSIAIPTNFTISVTTEILP |
| | | VSMTKTSVDCTMYICGDSIECSNLLLQYGSFCTQLNRALTGIA |
| | | VEQDKNTQEVFAQVKQIYKTPPIKDFGGFNFSQILPD |
| | | PSKPSKRSFIEDLLFNKVTLADAGFIKQYGDCLGDIAARDLICA |
| | | QKFNGLTVLPPLLTDEMIAQYTSALLAGTITSGWTF |
| | | GAGAALQIPFAMQMAYRFNGIGVTQNVLYENQKLIANQFNSAI |
| | | GKIQDSLSSTASALGKLQDVVNQNAQALNTLVKQLSS |
| | | NFGAISSVLNDILSRLDKVEAEVQIDRLITGRLQSLQTYVTQQLI |
| | | RAAEIRASANLAATKMSECVLGQSKRVDFCGKGYH |
| | | LMSFPQSAPHGVVFLHVTYVPSQEKNFTTTPAICHEGKAHFPR |
| | | EGVFVSNGTHWFVTQRNFYEPQIITTDNTFVSGSCDV |
| | | VIGIVNNTVYDPLQPELDSFKEELDKYFKNHTSPDVDLGDISGI |
| | | NASVVNIQKEIDRLNEVAKNLNESLIDLQELGKYEQ |
| | | YIKWPWYIWLGFIAGLIAIIMVTIMLCCMTSCCSCLKGCCSCGS |
| | | CCKFDEDDSEPVLKGVKLHYT |
| 41 | Pangolin | MLFFFFLHFALVNSQCVNLTGRAAIQPSFTNSSQRGVYYPDTI |
| | coronavirus | FRSNTLVLSQGYFLPFYSNVSWYYALTKTNSAEKRVD |
| | Surface | NPVLDFKDGIYFAATEKSNIVRGWIFGTTLDNTSQSLLIVNNAT |
| | glycoprotein | NVIIKVCNFQFCYDPYLSGYYHNNKTWSTREFAVYS |
| | (Genbank: | SYANCTFEYVSKSFMLDIAGKSGLFDTLREFVFRNVDGYFKIY |
| | QLR06866) | SKYTPVNVNSNLPIGFSALEPLVEIPAGINITKFRTL |
| | | LTIHRGDPMPNNGWTVFSAAYYVGYLAPRTFMLNYNENGTIT |
| | | DAVECALDPLSEAKCTLKSLTVEKGIYQTSNFRVQPTE |
| | | SIVRFPNITNLCPFGEVFNATTFASVYAWNRKRISNCVADYSVL |
| | | YNSTSFSTFKCYGVSPTKLNDLCFTNVYADSFVVRG |
| | | DEVRQIAPGQTGRIADYNYKLPDDFTGCVIAWNSNNLDSKVG |
| | | GNYNYLYRLFRKSNLKPFERDISTEIYQAGSTPQNGVE |
| | | GFNCYFPLQSYGFHPTNGVGYQPYRVVVLSFELLNAPATVCG |
| | | PKQSTNLVKNKCVNFNFNGLTGTGVLTESSKKFLPFQQ |
| | | FGRDIADTTDAVRDPQTLEILDITPCSFGGVSVITPGTNTSNQV |
| | | AVLYQDVNCTEVPVAIHADQLTPTWRVYSTGSNVFQ |
| | | TRAGCLIGAEHVNNTYECDIPIGAGICASYQTQTNSRSVSSQAI |
| | | IAYTMSLGAENSVAYANNSIAIPTNFTISVTTEILP |
| | | VSMTKTSVDCTMYICGDSIECSNLLLQYGSFCTQLNRALTGIA |
| | | VEQDKNTQEVFAQVKQIYKTPPIKDFGGFNFSQILPD |
| | | PSKPSKRSFIEDLLFNKVTLADAGFIKQYGDCLGDIAARDLICA |
| | | QKFNGLTVLPPLLTDEMIAQYTSALLAGTITSGWTF |
| | | GAGAALQIPFAMQMAYRFNGIGVTQNVLYENQKLIANQFNSAI |
| | | GKIQDSLSSTASALGKLQDVVNQNAQALNTLVKQLSS |
| | | NFGAISSVLNDILSRLDKVEAEVQIDRLITGRLQSLQTYVTQQLI |
| | | RAAEIRASANLAATKMSECVLGQSKRVDFCGKGYH |
| | | LMSFPQSAPHGVVFLHVTYVPSQEKNFTTTPAICHEGKAHFPR |
| | | EGVFVSNGTHWFVTQRNFYEPQIITTDNTFVSGSCDV |
| | | VIGIVNNTVYDPLQPELDSFKEELDKYFKNHTSPDVDLGDISGI |
| | | NASVVNIQKEIDRLNEVAKNLNESLIDLQELGKYEQ |
| | | YIKWPWYIWLGFIAGLIAIIMVTIMLCCMTSCCSCLKGCCSCGS |
| | | CCKFDEDDSEPVLKGVKLHYT |
| 42 | Bat | MFVFLVLLPLVSSQCVNLTTRTQLPPAYTNSSTRGVYYPDKVF |
| | coronavirus | RSSVLHLTQDLFLPFFSNVTWFHAIHVSGTNGIKRFD |
| | RaTG13 | NPVLPFNDGVYFASTEKSNIIRGWIFGTTLDSKTQSLLIVNNAT |
| | Spike | NVVIKVCEFQFCNDPFLGVYYHKNNKSWMESEFRVY |
| | glycoprotein | SSANNCTFEYVSQPFLMDLEGKQGNFKNLREFVFKNIDGYFKI |
| | (Genbank: | YSKHTPINLVRDLPPGFSALEPLVDLPIGINITRFQT |
| | QHR63300) | LLALHRSYLTPGDSSSGWTAGAAAYYVGYLQPRTFLLKYNEN |
| | | GTITDAVDCALDPLSETKCTLKSFTVEKGIYQTSNFRV |
| | | QPTDSIVRFPNITNLCPFGEVFNATTFASVYAWNRKRISNQVA |
| | | DYSVLYNSTSFSTFKCYGVSPTKLNDLCFTNVYADSF |
| | | VITGDEVRQIAPGQTGKIADYNYKLPDDFTGCVIAWNSKHIDAK |
| | | EGGNFNYLYRLFRKANLKPFERDISTEIYQAGSKPC |
| | | NGQTGLNCYYPLYRYGFYPTDGVGHQPYRVVVLSFELLNAPA |
| | | TVCGPKKSTNLVKNKCVNFNFNGLTGTGVLTESNKKFL |
| | | PFQQFGRDIADTTDAVRDPQTLEILDITPCSFGGVSVITPGTNA |
| | | SNQVAVLYQDVNCTEVPVAIHADQLTPTWRVYSTGS |
| | | NVFQTRAGCLIGAEHVNNSYECDIPIGAGICASYQTQTNSRSV |
| | | ASQSIIAYTMSLGAENSVAYSNNSIAIPTNFTISVTT |
| | | EILPVSMTKTSVDCTMYICGDSTECSNLLLQYGSFCTQLNRAL |
| | | TGIAVEQDKNTQEVFAQVKQIYKTPPIKDFGGFNFSQ |
| | | ILPDPSKPSKRSFIEDLLFNKVTLADAGFIKQYGDCLGDIAARDL |
| | | ICAQKFNGLTVLPPLLTDEMIAQYTSALLAGTITS |
| | | GWTFGAGAALQIPFAMQMAYRFNGIGVTQNVLYENQKLIANQ |
| | | FNSAIGKIQDSLSSTASALGKLQDVVNQNAQALNTLVK |
| | | QLSSNFGAISSVLNDILSRLDKVEAEVQIDRLITGRLQSLQTYVT |
| | | QQLIRAAEIRASANLAATKMSECVLGQSKRVDFCG |
| | | KGYHLMSFPQSAPHGVVFLHVTYVPAQEKNFTTAPAICHDGK |
| | | AHFPREGVFVSNGTHWFVTQRNFYEPQIITTDNTFVSG |
| | | SCDVVIGIVNNTVYDPLQPELDSFKEELDKYFKNHTSPDVDLG |
| | | DISGINASVVNIQKEIDRLNEVAKNLNESLIDLQELG |
| | | KYEQYIKWPWYIWLGFIAGLIAIIMVTIMLCCMTSCCSCLKGCC |
| | | SCGSCCKFDEDDSEPVLKGVKLHYT |
| 43 | SARS-CoV2 | MFVFLVLLPLVSSQCVNLTTRTQLPPAYTNSFTRGVYYPDKVF |
| | Surface | RSSVLHSTQDLFLPFFSNVTWFHAIHVSGTNGTKRFD |
| | glycoprotein | NPVLPFNDGVYFASTEKSNIIRGWIFGTTLDSKTQSLLIVNNAT |
| | (Genbank: | NVVIKVCEFQFCNDPFLGVYYHKNNKSWMESEFRVY |
| | YP_009724390) | SSANNCTFEYVSQPFLMDLEGKQGNFKNLREFVFKNIDGYFKI |
| | | YSKHTPINLVRDLPQGFSALEPLVDLPIGINITRFQT |
| | | LLALHRSYLTPGDSSSGWTAGAAAYYVGYLQPRTFLLKYNEN |
| | | GTITDAVDCALDPLSETKCTLKSFTVEKGIYQTSNFRV |
| | | QPTESIVRFPNITNLCPFGEVFNATRFASVYAWNRKRISNCVA |
| | | DYSVLYNSASFSTFKCYGVSPTKLNDLCFTNVYADSF |
| | | VIRGDEVRQIAPGQTGKIADYNYKLPDDFTGCVIAWNSNNLDS |
| | | KVGGNYNYLYRLFRKSNLKPFERDISTEIYQAGSTPC |
| | | NGVEGFNCYFPLQSYGFQPTNGVGYQPYRVVVLSFELLHAPA |
| | | TVCGPKKSTNLVKNKCVNFNFNGLTGTGVLTESNKKFL |
| | | PFQQFGRDIADTTDAVRDPQTLEILDITPCSFGGVSVITPGTNT |
| | | SNQVAVLYQDVNCTEVPVAIHADQLTPTWRVYSTGS |
| | | NVFQTRAGCLIGAEHVNNSYECDIPIGAGICASYQTQTNSPRR |
| | | ARSVASQSIIAYTMSLGAENSVAYSNNSIAIPTNFTI |
| | | SVTTEILPVSMTKTSVDCTMYICGDSTECSNLLLQYGSFCTQL |
| | | NRALTGIAVEQDKNTQEVFAQVKQIYKTPPIKDFGGF |
| | | NFSQILPDPSKPSKRSFIEDLLFNKVTLADAGFIKQYGDCLGDI |
| | | AARDLICAQKFNGLTVLPPLLTDEMIAQYTSALLAG |
| | | TITSGWTFGAGAALQIPFAMQMAYRFNGIGVTQNVLYENQKLI |
| | | ANQFNSAIGKIQDSLSSTASALGKLQDVVNQNAQALN |
| | | TLVKQLSSNFGAISSVLNDILSRLDKVEAEVQIDRLITGRLQSLQ |
| | | TYVTQQLIRAAEIRASANLAATKMSECVLGQSKRV |
| | | DFCGKGYHLMSFPQSAPHGVVFLHVTYVPAQEKNFTTAPAIC |
| | | HDGKAHFPREGVFVSNGTHWFVTQRNFYEPQIITTDNT |
| | | FVSGNCDVVIGIVNNTVYDPLQPELDSFKEELDKYFKNHTSPD |
| | | VDLGDISGINASWVNIQKEIDRLNEVAKNLNESLIDL |
| | | QELGKYEQYIKWPWYIWLGFIAGLIAIVMVTIMLCCMTSCCSCL |
| | | KGCCSCGSCCKFDEDDSEPVLKGVKLHYT |
| 44 | SARS-CoV2 | MFVFFVLLPLVFIQCVSFTNIIHLPSSYINSFTRGVYYPDKVFRS |
| | VOC_May_01 | SVLYSIRDFFLPFFSNVTWFHVIRTNVIKRFANPV |
| | | LPFNDGVYFAFIDKFNIIRGWIFGTTLDSKTQSLLIVNNATNVVIK |
| | | VCEFQFCNYPFYKNNKSCTKSESRVYSSATNCTF |
| | | EYVSKPFFIDLVVKQGNFKNFSEFVFKNIDGYFKIYSKHTPNLV |
| | | RGFPQGFLVLEPLVDLPIGINITRFQILYRSYLTPG |
| | | GFFLGLTAGSAAYYVGYLQLRTFLLKYNENGTITDAVDCALDP |
| | | LSEIKCTLKSFILEKGIYQTSNFRVQPTESIVRFPNI |
| | | TNLCPFGEVFNATRFASVYAWNRKRISNCVADYSFLYNSASF |
| | | STFKCYGVSLTKLNDLCFTNVYADSFVIRGDEVRQIAP |
| | | GKTGNIADYNYKLPDDFTGCVIAWNSKKLDSKVGGNYKYRFR |
| | | LFRKSNLKPFERDISTEIYQAGNKPCNGVKGFNCYSPL |
| | | QPYGFQPTYGVGYQPYRVVVLSFELLHSPSTVCGPKKSTNLV |
| | | KNKCVNFNFNGLIGTGVLTESNKNFLPFQQFGRDIDDI |
| | | TDAVRDPQTLDILDITPCSFGGVSVITPGTNTSNQVAVLYHGV |
| | | NCTEVPFAIHSDQLTPTWRVYSTGFNVFQTRAGCLIG |
| | | VEYVNNSYECDIPIGAGICATYHTHTKSHRRARSVVSQSIIAYT |
| | | MSLGVENLVVYSNNSIAIPINFTISVITEILPVSMA |
| | | KTSVDCTMYICGDSTECSNLLLQYGSFCTQLNRALTVIAIEQDK |
| | | NTQQVFAQVKQIYKIPPIKYFGGFNFSQILPDSSKS |
| | | SKRSFIEDLFFNKVTLADAGFIKQYGDCLGDISARDLICAQKFN |
| | | GLNVLPPLLTDEMIAQYTSALLSGTITSGWTLGAGA |
| | | ALQIPFSMQMAYRFNGIGVTQNVLYENQKLIANQFNSAIGKIQY |
| | | SFFFTAPALGKLQHVVNQNARALNTLVKQLSSNFGA |
| | | ISSVLNDILARLDKVEAEVQIDRLITGRLQSLQTYVTQQLIRAAEI |
| | | RSSANLAAIKMSECVLGQSKRVDFCGKGYHLMSF |
| | | PQSAPHGVVFFHVTYVPALENNFTTSPAICHYGKAHFPREGVF |
| | | VSNGTYWFLTQRNFYEPQIITIHNTFLSGNCDVVIGI |
| | | VNNTVYDPLQPELDSFKEELDKYFKNHTSSYVDLVDISGINASF |
| | | VNIQKEIDRLNEVANNLNESLIDLQQLGKYEQYIKW |
| | | PWYIWLCFIAGLIAILIVTIMLCCITSCCSCLKGCCSCGFCCKFD |
| | | EDDSELLLKGVKLHYT |
| 45 | SARS-CoV2 | MFVFFVLLPLVFIQCVNFTIIIHLPSSYINSFTRGVYYPDKVFRSS |
| | Voc | VLYSIRDFFLPFFSNVTWFHVIRTNVIKRFANPV |
| | Whole VOC | LPFNDGVYFASIDKFNIIRGWIFGTTLDSKTQSLLIVNNATNVVI |
| | surface | KVCEFQFCNYPFYKNNKSCTESESRVYSSATNCTF |
| | glycoprotein | EYVSKPFFIDLVVKQGNFKNFSEFVFKNIDGYFKIYSKHTPNLV |
| | (Genbank: | RGFPQGFLVLEPLVDLPIGINITRFQTLYRSYLTPG |
| | YP_009724390) | GFFLGLTAGSAAYYVGYLQLRTFLLKYNENGTITDAVDCALDP |
| | | LSEIKCTLKSFILEKGIYQTSNFRVQPTESIVRFPNI |
| | | TNLCPFGEVFNATRFASVYAWNRKRISNCVADYSFLYNSASF |
| | | STFKCYGVSLTKLNDLCFTNVYADSFVIRGDEVRQIAP |
| | | GKTGNIADYNYKLPDDFTGCVIAWNSKKLDSKVGGNYNYRFR |
| | | LFRKSNLKPFERDISTEIYQAGNKPCNGVKGFNCYSPL |
| | | QPYGFQPTYGVGYQPYRVVVLSFELLHSPSTVCGPKKSTNLV |
| | | KNKCVNFNFNGLIGTGVLTESNKNFLPFQQFGRDIDDI |
| | | TDAVRDPQTLDILDITPCSFGGVSVITPGTNTSNQVAVLYHGV |
| | | NCTEVPFAIHSDQLTPTWRVYSTGFNVFQTRAGCLIG |
| | | VQYVNNSYECDIPIGAGICATYHTHTKSHRRARSVVSQSIIAYT |
| | | MSLGVENLVVYSNNSIAIPINFTISVITEILPVSMA |
| | | KTSVDCTMYICGDSTECSNLLLQYGSFCTQLNRALTVIAIEQDK |
| | | NTQQVFAQVKQIYKIPPIKYFGGFNFSQILPDSSKS |
| | | SKRSFIEDLFFNKVTLADAGFIKQYGDCLGDISARDLICAQKFN |
| | | GLNVLPPLLTDEMIAQYTSALLSGTITSGWTLGAGA |
| | | ALQIPFSMQMAYRFNGIGVTQNVLYENQKLIANQFNSAIGKIQY |
| | | SFFFTASALGKLQHVVNQNARALNTLVKQLSSNFGA |
| | | ISSVLNDILARLDKVEAEVQIDRLITGRLQSLQTYVTQQLIRAAEI |
| | | RSSANLAAIKMSECVLGQSKRVDFCGKGYHLMSF |
| | | PQSAPHGVVFFHVTYVPALENNFTTSPAICHYGKAHFPREGVF |
| | | VSNGTHWFLTQRNFYEPQIITIHNTFLSGNCDVVIGI |
| | | VNNTVYDPLQPELDSFKEELDKYFKNHTSSYVDLVDISGINASF |
| | | VNIQKEIDRLNEVANNLNESLIDLQQLGKYEQYIKW |
| | | PWYIWLCFIAGFIAILIVTIMLCCITSCCSCLKGCCSCGFCCKFD |
| | | EDDSELLLKGVKLHYT |
| 46 | Pangolin | MFVFLFVLPLVSSQCVNLTTRTGIPPGYTNSSTRGVYYPDKVF |
| | coronavirus | RSSILHLTQDLFLPFFSNVTWFNTINYQGGFKKFDNP |
| | Spike protein | VLPFNDGVYFASTEKSNIIRGWIFGTTLDARTQSLLIVNNATNV |
| | (Genbank: | VIKVCEFQFCTDPFLGVYYHNNNKTWVENEFRVYSS |
| | QIA48614) | ANNCTFEYISQPFLMDLEGKQGNFKNLREFVFKNVDGYFKIYS |
| | | KHTPIDLVRDLPRGFAALEPLVDLPIGINITRFQTLL |
| | | ALHRSYLTPGNLESGWTTGAAAYYVGYLQQRTFLLSYNQNGT |
| | | ITDAVDCSLDPLSETKCTLKSLTVEKGIYQTSNFRVQP |
| | | TISIVRFPNITNLCPFGEVFNASKFASVYAWNRKRISNCVADYS |
| | | VLYNSTSFSTFKCYGVSPTKLNDLCFTNVYADSFVV |
| | | KGDEVRQIAPGQTGVIADYNYKLPDDFTGCVIAWNSVKQDALT |
| | | GGNYGYLYRLFRKSKLKPFERDISTEIYQAGSTPQNG |
| | | QVGLNCYYPLERYGFHPTTGVNYQPFRVVVLSFELLNGPATV |
| | | CGPKLSTTLVKDKCVNFNFNGLTGTGVLTTSKKQFLPF |
| | | QQFGRDISDTTDAVRDPQTLEILDITPCSFGGVSVITPGTNTSN |
| | | QVAVLYQDVNCTEVPMAIHAEQLTPAWRVYSAGANV |
| | | FQTRAGCLVGAEHVNNSYECDIPVGAGICASYHSMSSLRSVN |
| | | QRSIIAYTMSLGAENSVAYSNNSIAIPTNFTISVTTEI |
| | | LPVSMTKTSVDCTMYICGDSIECSNLLLQYGSFCTQLNRALTGI |
| | | AVEQDKNTQEVFAQVKQIYKTPPIKDFGGFNFSQIL |
| | | PDPSKPSKRSFIEDLLFNKVTLADAGFIKQYGDCLGDIAARDLI |
| | | CAQKFNGLTVLPPLLTDEMIAQYTSALLAGTITSGW |
| | | TFGAGAALQIPFAMQMAYRFNGIGVTQNVLYENQKLIANQFNS |
| | | AIGKIQDSLSSTASALGKLQDVVNQNAQALNTLVKQL |
| | | SSNFGAISSVLNDILSRLDKVEAEVQIDRLITGRLQSLQTYVTQ |
| | | QLIRAAEIRASANLAATKMSECVLGQSKRVDFCGKG |
| | | YHLMSFPQSAPHGVVFLHVTYVPAQEKNFTTAPAICHEGKAH |
| | | FPREGVFVSNGTHWFITQRNFYEPQIITTDNTFVSGSC |
| | | DVVIGIVNNTVYDPLQPELDSFKEELDKYFKNHTSPDVDLGDIS |
| | | GINASVVNIQKEIDRLNEVAKNLNESPIDLQELGKY |
| | | EQYIKWPWYIWLGFIAGLIAIIMVTIMLCCMTSCCSCLKGCCSC |
| | | GSCCKFDEDDSEPVLKGVKLHYT |
| 47 | Pangolin | MFVFLFVLPLVSSQCVNLTTRTGIQPGYTNSSTRGVYYPDKVF |
| | coronavirus | RSSILHLTQDLFLPFFSNVTWFNTINYQGGFKKFDNP |
| | Spike protein | VLPFNDGVYFASTEKSNIIRGWIFGTTLDARTQSLLIVNNATNV |
| | (Genbank: | VIKVCEFQFCTDPFLGVYYHNNNKTWVENEFRVYSS |
| | QIA48623) | ANNCTFEYISQPFLMDLEGKQGNFKNLREFVFKNVDGYFKIYS |
| | | KHTPIDLVRDLPRGFAALEPLVDLPIGINITRFQTLL |
| | | ALHRSYLTPGKLESGWTTGAAAYYVGYLQQRTFLLSYNQNGT |
| | | ITDAVDCSLDPLSETKCTLKSLTVEKGIYQTSNFRVQP |
| | | TISIVRFPNITNLCPFGEVFNASKFASVYAWNRKRISNCVADYS |
| | | VLYNSTSFSTFKCYGVSPTKLNDLCFTNVYADSFVV |
| | | KGDEVRQIAPGQTGVIADYNYKLPDDFTGCVIAWNSVKQDALT |
| | | GGNYLYRLFRKSKLKPFERDISTEIYQAGSTPCNGQV |
| | | GLNCYYPLERYGFHPTTGVNYQPFRVVVLSFELLNGPATVCG |
| | | PKLSTTLVKDKCVNFNFNGLTGTGVLTTSKKQFLPFQQ |
| | | FGRDISDTTDAVRDPQTLEILDITPCSFGGVSVITPGTNTSNQV |
| | | AVLYQDVNCTEVPMAIHAEQLTPAWRVYSAGANVFQ |
| | | TRAGCLVGAEHVNNSYECDIPVGAGICASYHSMSSLRSVNQR |
| | | SIIAYTMSLGAENSVAYSNNSIAIPTNFTISVTTEILP |
| | | VSMTKTSVDCTMYICGDSIECSNLLLQYGSFCTQLNRALTGIA |
| | | VEQDKNTQEVFAQVKQIYKTPPIKDFGGFNFSQILPD |
| | | PSKPSKRSFIEDLLFNKVTLADAGFIKQYGDCLGDIAARDLICA |
| | | QKFNGLTVLPPLLTDEMIAQYTSALLAGTITSGWTF |
| | | GAGAALQIPFAMQMAYRFNGIGVTQNVLYENQKLIANQFNSAI |
| | | GKIQDSLSSTASALGKLQDVVNQNAQALNTLVKQLSS |
| | | NFGAISSVLNDILSRLDKVEAEVQIDRLITGRLQSLQTYVTQQLI |
| | | RAAEIRASANLAATKMSECVLGQSKRVDFCGKGYH |
| | | LMSFPQSAPHGVVFLHVTYVPAQEKNFTTAPAICHEGKAHFP |
| | | REGVFVSNGTHWFITQRNFYEPQIITTDNTFVSGSCDV |
| | | VIGIVNNTVYDPLQPELDSFKEELDKYFKNHTSPDVDLGDISGI |
| | | NASVVNIQKEIDRLNEVAKNLNESLIDLQELGKYEQ |
| | | YIKWPWYIWLGFIAGLIAIIMVTIMLCCMTSCCSCLKGCCSCGS |
| | | CCKFDEDDSEPVLKGVKLHYT |
| 48 | Pangolin | MFVFLFVLPLVSSQCVNLTTRTGIPPGYTNSSTRGVYYPDKVF |
| | coronavirus | RSSILHLTQDLFLPFFSNVTWFNTITYQGGSKKFDNP |
| | Spike protein | VLPFNDGVYFASTEKSNIIRGWIFGTTLDARTQSLLIVNNATNV |
| | (Genbank: | VIKVCEFQFCTDPFLGVYYHNNNKTWVENEFRVYSS |
| | QIA48641) | ANNCTFEYISQPFLMDLEGKQGNFKNLREFVFKNVDGYFKIYS |
| | | KHTPIDLVRDLPRGFAALEPLVDLPIGINITRFQTLL |
| | | ALHRSYLTPGKLESGWTTGAAAYYVGYLQQRTFLLSYNQNGT |
| | | ITDAVDCSLDPLSETKCTLKSLTVEKGIYQTSNFRVQP |
| | | TISIVRFPNITNLCPFGEVFNASKFASVYAWNRKRISNCVADYS |
| | | VLYNSTSFSTFKCYGVSPTKLNDLCFTNVYADSFVV |
| | | KGDEVRQIAPGQTGVIADYNYKLPDDFTGCVIAWNSVKQDALT |
| | | GDNYGYLYRLFRKSKLKPFERDISTEIYQAGSTPCNG |
| | | QVGLNCYYPLERYGFHPTTGVNYQPFRVVVLSFELLNGPATV |
| | | CGPKLSTTLVKDKCVNFNFNGLTGTGVLTTSKKQFLPF |
| | | QQFGRDISDTTDAVRDPQTLEILDITPCSFGGVSVITPGTNTSN |
| | | QVAVLYQDVNCTEVPMAIHAEQLTPAWRVYSAGANV |
| | | FQTRAGCLVGAEHVNNSYECDIPVGAGICASYHSMSSFRSVN |
| | | QRSIIAYTMSLGAENSVAYSNNSIAIPTNFTISVTTEI |
| | | LPVSMTKTSVDCTMYICGDSIECSNLLLQYGSFCTQLNRALTGI |
| | | AVEQDKNTQEVFAQVKQIYKTPPIKDFGGFNFSQIL |
| | | PDPSKPSKRSFIEDLLFNKVTLADAGFIKQYGDCLGDIAARDLI |
| | | CAQKFNGLTVLPPLLTDEMIAQYTSALLAGTITSGW |
| | | TFGAGAALQIPFAMQMAYRFNGIGVTQNVLYENQKLIANQFNS |
| | | AIGKIQDSLSSTASALGKLQDVVNQNAQALNTLVKQL |
| | | SSNFGAISSVLNDILSRLDKVEAEVQIDRLITGRLQSLQTYVTQ |
| | | QLIRAAEIRASANLAATKMSECVLGQSKRVDFCGKG |
| | | YHLMSFPQSAPHGVVFLHVTYVPAQEKNFTTAPAICHEGKAH |
| | | FPREGVFVSNGTHWFITQRNFYEPQIITTDNTFVSGSC |
| | | DVVIGIVNNTVYDPLQPELDSFKEELDKYFKNHTSPDVDLGDIS |
| | | GINASVVNIQKEIDRLNEVAKNLNESLIDLQELGKY |
| | | EQYIKWPWYIWLGFIAGLIAIIMVTIMLCCMTSCCSCLKGCCSC |
| | | GSCCKFDEDDSEPVLKGVKLHYT |
| 49 | Pangolin | MFVFLFVLPLVSSQCVNLTTRTGIPPGYTNSSTRGVYYPDKVF |
| | coronavirus | RSSILHLTQDLFLPFFSNVTWFNTINYQGGFKKFDNP |
| | Spike protein | VLPFNDGVYFASTEKSNIIRGWIFGTTLDARTQSLLIVNNATNV |
| | (Genbank: | VIKVCEFQFCTDPFLGVYYHNNNKTWVENEFRVYSS |
| | QIA48632) | ANNCTFEYISQPFLMDLEGKQGNFKNLREFVFKNVDGYFKIYS |
| | | KHTPIDLVRDLPRGFAALEPLVDLPIGINITRFQTLL |
| | | ALHRSYLTPGKLESGWTTGAAAYYVGYLQQRTFLLSYNQNGT |
| | | ITDAVDCSLDPLSETKCTLKSLTVEKGIYQTSNFRVQP |
| | | TISIVRFPNITNLCPFGEVFNASKFASVYAWNRKRISNCVADYS |
| | | VLYNSTSFSTFKCYGVSPTKLNDLCFTNVYADSFVV |
| | | KGDEVRQIAPGQTGVIADYNYKLPDDFTGCVIAWNSVKQDALT |
| | | GGNYGYLYRLFRKSKLKPFERDISTEIYQAGSTPQNG |
| | | QVGLNCYYPLERYGFHPTTGVNYQPFRVVVLSFELLNGPATV |
| | | CGPKLSTTLVKDKCVNFNFNGLTGTGVLTTSKKQFLPF |
| | | QQFGRDISDTTDAVRDPQTLEILDITPCSFGGVSVITPGTNTSN |
| | | QVAVLYQDVNCTEVPMAIHAEQLTPAWRVYSAGANV |
| | | FQTRAGCLVGAEHVNNSYECDIPVGAGICASYHSMSSFRSVN |
| | | QRSIIAYTMSLGAENSVAYSNNSIAIPTNFTISVTTEI |
| | | LPVSMTKTSVDCTMYICGDSIECSNLLLQYGSFCTQLNRALTGI |
| | | AVEQDKNTQEVFAQVKQIYKTPPIKDFGGFNFSQIL |
| | | PDPSKPSKRSFIEDLLFNKVTLADAGFIKQYGDCLGDIAARDLI |
| | | CAQKFNGLTVLPPLLTDEMIAQYTSALLAGTITSGW |
| | | TFGAGAALQIPFAMQMAYRFNGIGVTQNVLYENQKLIANQFNS |
| | | AIGKIQDSLSSTASALGKLQDVVNQNAQALNTLVKQL |
| | | SSNFGAISSVLNDILSRLDKVEAEVQIDRLITGRLQSLQTYVTQ |
| | | QLIRAAEIRASANLAATKMSECVLGQSKRVDFCGKG |
| | | YHLMSFPQSAPHGVVFLHVTYVPAQEKNFTTAPAICHEGKAH |
| | | FPREGVFVSNGTHWFITQRNFYEPQIITTDNTFVSGSC |
| | | DVVIGIVNNTVYDPLQPELDSFKEELDKYFKNHTSPDVDLGDIS |
| | | GINASVVNIQKEIDRLNEVAKNLNESLIDLQELGKY |
| | | EQYIKWPWYIWLGFIAGLIAIIMVTIMLCCMTSCCSCLKGCCSC |
| | | GSCCKFDEDDSEPVLKGVKLHYT |
| 50 | Pangolin | MFVFLFVLPLVSSQCVNLTTRTGIPPGYTNSSTRGVYYPDKVF |
| | coronavirus | RSSILHLTQDLFLPFFSNVTWENTIHLNYQGGFKKFD |
| | Spike protein | NPVLPXNDGVYFASTEKSNIIRGWIFGTTLDARTQSLLIVNNAT |
| | (Genbank: | NVVIKVCEFQFCTDPFLGVYYHNNNKTWVENEFRVY |
| | QIQ54048) | SSANNCTFEYISQPFLMDLEGKQGNFKNLREFVFKNVDGYFKI |
| | | YSKHTPIDLVRDLPRGFAALEPLVDLPIGINITRFQT |
| | | LLALHRSYLTPGKLESGWTTGAAAYYVGYLQQRTFLLSYNQN |
| | | GTITDAVDCSLDPLSETKCTLKSLTVEKGIYQTSNFRV |
| | | QPTISIVRFPNITNLCPFGEVFNASKFASVYAWNRKRISNCVAD |
| | | YSVLYNSTSFSTFKCYGVSPTKLNDLCFTNVYADSF |
| | | VVKGDEVRQIAPGQTGVIADYNYKLPDDFTGCVIAWNSVKQD |
| | | ALTGGNYGYLYRLFRKSKLKPFERDISTEIYQAGSTPC |
| | | NGQVGLNCYYPLERYGFHPTTGVNYQPFRVVVLSXELLNGPA |
| | | TVCGPKLSTTLVKDKCVNFNFNGLTGTGVLTTSKKQFL |
| | | PFQQFGRDISDTTDAVRDPQTLEILDITPCSFGGVSVITPGTNT |
| | | SNQVAVLYQDVNCTEVPMAIHAEQLTPAWRVYSAGA |
| | | NVFQTRAGCLVGAEHVNNSYECDIPVGAGICASYHSMSSFRS |
| | | VNQRSIIAYTMSLGAENSVAYSNNSIAIPTNFTISVTT |
| | | EILPVSMTKTSVDCTMYICGDSIECSNLLLQYGSFCTQLNRALT |
| | | GIAVEQDKNTQEVFAQVKQIYKTPPIKDFGGFNFLQ |
| | | ILPDPSKPSKRSFIEDLLFNKVTLADAGFIKQYGDCLGDIAARDL |
| | | ICAQKFNGLTVLPPLLTDEMIAQYTSALLAGTITS |
| | | GWTFGAGAALQIPFAMQMAYRFNGIGVTQNVLYENQKLIANQ |
| | | FNSAIGKIQDSLSSTASALGKLQDVVNQNAQALNTLVK |
| | | QLSSNFGAISSVLNDILSRLDKVEAEVQIDRLITGRLQSLQTYVT |
| | | QQLIRAAEIRASANLAATKMSECVLGQSKRVDFCG |
| | | KGYHLMSFPQSAPHGVVFLHVTYVPAQEKNFTTAPAICHEGK |
| | | AHFPREGVFVSNGTHWFITQRNFYEPQIITTDNTFVSG |
| | | SCDVVIGIVNNTVYDPLQPELDSFKEELDKYFKNHTSPDVDLG |
| | | DISGINASVVNIQKEIDRLNEVAKNLNESLIDLQELG |
| | | KYEQYIKWPWYIWLGFIAGLIAIIMVTIMLCCMTSCCSCLKGCC |
| | | SCGSCCKFDEDDSEPVLKGVKLHYT |
| 51 | SC2r-CoV | MFILVLLNVLSVYGCVNITYGSHHLYVSSRTRGVYYPDDAFRS |
| | batACE2 | STNVLHEGFFLPFDSNVTWYSFWNQKYSVATSPFGDG |
| | Spike | VYFSTIDKSNVVRGWVFGTTLDNDTQSVLLYNDGTHVRVEVC |
| | | TFHFCPTPVFSASSPHLYSSAFNCTLNYTLASVRADFT |
| | | EVDGSFKTIREFVFKLQDGSLNVYYASTSYVLAIGATSQLPSG |
| | | VTPLVPLWKIPIGLNITNFKTLVYLRSDNTPLQAAYV |
| | | VGHLKRRTMMFKYDENGTIVDAIDCALDPLSETKCTLRSFIVEK |
| | | GIYQTSNFRVQPQDTVVRFPNITNLCPFSEVFNATT |
| | | FASVYAWNRKRISNCVADYSVLYNSTSFSTFQCYGVSSTKLN |
| | | DLCFTNVYADSFVVRGDEVRQIAPGQTGVIADYNYKLP |
| | | DDFTGCVLAWNSRNQDASTSGNFNYYYRIWRSEKLRPFERDI |
| | | AHYDYQVGTQFKSSLKNYGFYSSAGDSHQPYRVVVLSF |
| | | ELLNAPATVCGPKQSTELIKNKCVNFNFNGLTGTGVLTDSNKK |
| | | FQSFQQFGRDVSDFTDSVKDPKTLEVLDITPCSYGGV |
| | | SVITPGTNASTQVAVLYQDVNCTDVPTAIHAEQLTPSWRVYST |
| | | GTNMFQTQAGCLIGAEHVNNSYDCDIPIGAGICATYH |
| | | TPSMLRSANNNKRIVAYVMSLGAENSVAYSNNTIAIPTNFTISV |
| | | TTEVMPVSMTKTSVDCTMYICGDSVECSTLLLQYGS |
| | | FCTQLNRALTGIAVEQDKNTQEVFAQVKQIYKTPDIKDFGGFN |
| | | FSQILPDPSKPSKRSFIEDLLFNKVTLADAGFVKQYG |
| | | DCLGDIQARDLICAQKFNGLTVLPPLLTDEMIAAYTAALISGTAT |
| | | AGWTFGAGAALQIPFAMQMAYRFNGIGVTQNVLYE |
| | | NQKLIANQFNSAIGKIQESLTSTASALGKLQDVVNQNAQALNTL |
| | | VKQLSSNFGAISSVLNDIISRLDKVEAEVQIDRLIT |
| | | GRLQSLQTYVTQQLIRAAEIRASANLAATKMSECVLGQSKRVD |
| | | FCGKGYHLMSFPQAAPHGVVFLHVTYIPSQERNFTTA |
| | | PAICHEGKAHFPREGVFVSNGTHWFITQRNFYEPQIITTDNTFV |
| | | SGTCDVVIGIVNNTVYDPLQPELESFKDELDKYFKN |
| | | HTSPDIDLGDISGINASVVDIQKEIDILKDVAKNLNESLINLQELG |
| | | KYEQYIKWPWYVWLGFIAGLIAIIMVTIMLCCMT |
| | | SCCSCLKGCCSCGSCCKFDEDDSEPVLKGVKLHYT |
| 52 | Bats SARS | MFILVLLNVLSVYGCVNITYGSHHLYVSSRTRGVYYPDDAFRS |
| | coronavirus | STNVLHEGFFLPFDSNVTWYSFWNQKYSVATSPFGDG |
| | Rc-0319 | VYFSTIDKSNVVRGWVFGTTLDNDTQSVLLYNDGTHVRVEVC |
| | Spike | TFHFCPTPVFSASSPHLYSSAFNCTLNYTLASVRADFT |
| | (Genbank: | EVDGSFKTIREFVFKLQDGSLNVYYASTSYVLAIGATSQLPSG |
| | QIQ54048) | VTPLVPLWKIPIGLNITNFKTLVYLRSDNTPLQAAYV |
| | | VGHLKRRTMMFKYDENGTIVDAIDCALDPLSETKCTLRSFIVEK |
| | | GIYQTSNFRVQPQDTVVRFPNITNLCPFSEVENATT |
| | | FASVYAWNRKRISNCVADYSVLYNSTSFSTFQCYGVSSTKLN |
| | | DLCFTNVYADSFVVRGDEVRQIAPGQTGVIADYNYKLP |
| | | DDFTGCVLAWNSRNQDASTSGNFNYYYRIWRSEKLRPFERDI |
| | | AHYDYQVGTQFKSSLKNYGFYSSAGDSHQPYRVVVLSF |
| | | ELLNAPATVCGPKQSTELIKNKCVNFNFNGLTGTGVLTDSNKK |
| | | FQSFQQFGRDVSDFTDSVKDPKTLEVLDITPCSYGGV |
| | | SVITPGTNASTQVAVLYQDVNCTDVPTAIHAEQLTPSWRVYST |
| | | GTNMFQTQAGCLIGAEHVNNSYDCDIPIGAGICATYH |
| | | TPSMLRSANNNKRIVAYVMSLGAENSVAYSNNTIAIPTNFTISV |
| | | TTEVMPVSMTKTSVDCTMYICGDSVECSTLLLQYGS |
| | | FCTQLNRALTGIAVEQDKNTQEVFAQVKQIYKTPDIKDFGGFN |
| | | FSQILPDPSKPSKRSFIEDLLFNKVTLADAGFVKQYG |
| | | DCLGDIQARDLICAQKFNGLTVLPPLLTDEMIAAYTAALISGTAT |
| | | AGWTFGAGAALQIPFAMQMAYRFNGIGVTQNVLYE |
| | | NQKLIANQFNSAIGKIQESLTSTASALGKLQDVVNQNAQALNTL |
| | | VKQLSSNFGAISSVLNDIISRLDKVEAEVQIDRLIT |
| | | GRLQSLQTYVTQQLIRAAEIRASANLAATKMSECVLGQSKRVD |
| | | FCGKGYHLMSFPQAAPHGVVFLHVTYIPSQERNFTTA |
| | | PAICHEGKAHFPREGVFVSNGTHWFITQRNFYEPQIITTDNTFV |
| | | SGTCDVVIGIVNNTVYDPLQPELESFKDELDKYFKN |
| | | HTSPDIDLGDISGINASVVDIQKEIDILKDVAKNLNESLINLQELG |
| | | KYEQYIKWPWYVWLGFIAGLIAIIMVTIMLCCMT |
| | | SCCSCLKGCCSCGSCCKFDEDDSEPVLKGVKLHYT |
| 53 | Bat SARS-like | SNFRVAPSKEVVRFPNITNLCPFGEVFNATTFPSVYAWERKRI |
| | coronavirus | SNCVADYSVLYNSTSFSTFKCYGVSATKLNDLCFSNV |
| | Rs7327 | YADSFVVKGDDVRQIAPGQTGVIADYNYKLPDDFMGCVLAWN |
| | S protein | TRNIDATSTGNYNYKYRSLRHGKLRPFERDISNVPFSP |
| | RBD | DGKPCTPPAFNCYWPLNDYGFFTTNGIGYQPYRVVVLSFELL |
| | (Genbank: | NAPATVCGPKLSTDLIKNQCVNFNFNGLTGTGVLTSSS |
| | ATO98218) | KRFQPFQQFGRDVSDFTDSVRDPKTSEIL |
| 54 | Coronavirus | SNFRVAPSKEVVRFPNITNLCPFGEVFNATTFPSVYAWERKRI |
| | BtRs- | SNCVADYSVLYNSTSFSTFKCYGVSATKLNDLCFSNV |
| | BetaCoV/YN2018B | YADSFVVKGDDVRQIAPGQTGVIADYNYKLPDDFMGCVLAWN |
| | S protein | TRNIDATSTGNYNYKYRSLRHGKLRPFERDISNVPFSP |
| | RBD | DGKPCTPPAFNCYWPLNDYGFFTTNGIGYQPYRVVVLSFELL |
| | (Genbank: | NAPATVCGPKLSTDLIKNQCVNFNFNGLTGTGVLTPSS |
| | QDF43825) | KRFQPFQQFGRDVSDFTDSVRDPKTSEIL |
| 55 | Rhinolophus | SNFRVSPSKEVVRFPNITNLCPFGEVFNATTFPSVYAWERKRI |
| | affinis | SNCVADYSVLYNSTSFSTFKCYGVSAIKLNDLCFSNV |
| | coronavirus | YADSFVVKGDDVRQIAPGQTGVIADYNYKLPDDFMGCVLAWN |
| | LYRa11 | TRNIDATSSGNFNYKYRSLRHGKLRPFERDISNVPFSP |
| | S protein | DGKPCTPPAFNCYWPLNDYGFYTTNGIGYQPYRVVVLSFELL |
| | RBD | NAPATVCGPKLSTDLITNQCVNFNFNGLTGTGVLTPSL |
| | (Genbank: | KRFQPFQQFGRDFSDFTDSVRDPKTLEVL |
| | AHX37558) | |
| 56 | Rhinolophus | SNFRVSPSREVVRFPNITNLCPFGEVFNATTFPSVYAWERKRI |
| | affinis | SNCVADYSVLYNSTSFSTFKCYGVSAIKLNDLCFSNV |
| | coronavirus | YADSFVVKGDDVRQIAPGQTGVIADYNYKLPDDFMGCVLAWN |
| | LYRa3 | TRNIDATSSGNFHYKYRSLRHGKLRPFERDISNVPFSP |
| | S protein | DGKPCTPPAFNCYWPLNDYGFYTTNGIGYQPYRVVVLSFELL |
| | RBD | NAPATVCGPKLSTDLITNQCVNFNFNGLTGTGVLTPSS |
| | (Genbank: | KRFQPFQQFGRDVSDFTDSVRDPKTLEVL |
| | AHX37569) | |
| 57 | SARS | SNFRVVPSGDVVRFPNITNLCPFGEVFNATKFPSVYAWERKKI |
| | coronavirus | SNCVADYSVLYNSTFFSTFKCYGVSATKLNDLCFSNV |
| | Tor2 Spike | YADSFVVKGDDVRQIAPGQTGVIADYNYKLPDDFMGCVLAWN |
| | glycoprotein | TRNIDATSTGNYNYKYRYLRHGKLRPFERDISNVPFSP |
| | RBD | DGKPCTPPALNCYWPLNDYGFYTTTGIGYQPYRVVVLSFELL |
| | (Genbank: | NAPATVCGPKLSTDLIKNQCVNFNFNGLTGTGVLTPSS |
| | YP_009825051) | KRFQPFQQFGRDVSDFTDSVRDPKTSEIL |
| 58 | Bat SARS-like | SNFRVAPSKEVVRFPNITNLCPFGEVFNATTFPSVYAWERKRI |
| | coronavirus | SNCVADYSVLYNSTSFSTFKCYGVSATKLNDLCFSNV |
| | Rs3367 | YADSFVVKGDDVRQIAPGQTGVIADYNYKLPDDFTGCVLAWN |
| | S protein | TRNIDATQTGNYNYKYRSLRHGKLRPFERDISNVPFSP |
| | RBD | DGKPCTPPAFNCYWPLNDYGFYITNGIGYQPYRVVVLSFELLN |
| | (Genbank: | APATVCGPKLSTDLIKNQCVNFNFNGLTGTGVLTPSS |
| | AGZ48818) | KRFQPFQQFGRDVSDFTDSVRDPKTSEIL |
| 59 | SARS-like | SNFRVAPSKEVVRFPNITNLCPFGEVFNATTFPSVYAWERKRI |
| | coronavirus | SNCVADYSVLYNSTSFSTFKCYGVSATKLNDLCFSNV |
| | WIV16 | YADSFVVKGDDVRQIAPGQTGVIADYNYKLPDDFTGCVLAWN |
| | S protein | TRNIDATQTGNYNYKYRSLRHGKLRPFERDISNVPFSP |
| | RBD | DGKPCTPPAFNCYWPLNDYGFYITNGIGYQPYRVVVLSFELLN |
| | (Genbank: | APATVCGPKLSTDLIKNQCVNFNFNGLTGTGVLTPSS |
| | ALK02457) | KRFQPFQQFGRDVLDFTDSVRDPKTSEIL |
| 60 | Bat SARS-like | SNFRVAPSKEVVRFPNITNLCPFGEVFNATTFPSVYAWERKRI |
| | coronavirus | SNCVADYSVLYNSTSFSTFKCYGVSATKLNDLCFSNV |
| | Rs4231 | YADSFVVKGDDVRQIAPGQTGVIADYNYKLPDDFLGCVLAWN |
| | S protein | TNSKDSSTSGNYNYLYRWVRRSKLNPYERDLSNDIYSP |
| | RBD | GGQSCSAIGPNCYNPLRPYGFFTTAGVGHQPYRVVVLSFELL |
| | (Genbank: | NAPATVCGPKLSTDLIKNQCVNFNFNGLTGTGVLTSSS |
| | ATO98157) | KRFQPFQQFGRDVSDFTDSVRDPKTSEIL |
| 61 | Bat SARS-like | SNFRVAPSKEVVRFPNITNLCPFGEVFNATTFPSVYAWERKRI |
| | coronavirus | SNCVADYSVLYNSTSFSTFKCYGVSATKLNDLCFSNV |
| | RsSHC014 | YADSFVVKGDDVRQIAPGQTGVIADYNYKLPDDFLGCVLAWN |
| | S protein | TNSKDSSTSGNYNYLYRWVRRSKLNPYERDLSNDIYSP |
| | RBD | GGQSCSAVGPNCYNPLRPYGFFTTAGVGHQPYRVVVLSFELL |
| | (Genbank: | NAPATVCGPKLSTDLIKNQCVNFNFNGLTGTGVLTPSS |
| | AGZ48806) | KRFQPFQQFGRDVSDFTDSVRDPKTSEIL |
| 62 | Bat SARS-like | SNFRVAPSKEVVRFPNITNLCPFGEVFNATTFPSVYAWERKRI |
| | coronavirus | SNCVADYSILYNSTSFSTFKCYGVSATKLNDLCFSNV |
| | Rs4084 | YADSFVVKGDDVRQIAPGQTGVIADYNYKLPDDFLGCVLAWN |
| | S protein | TNSKDSSTSGNYNYLYRWVRRSKLNPYERDLSNDIYSP |
| | RBD | GGQSCSAVGPNCYNPLRPYGFFTTAGVGHQPYRVVVLSFELL |
| | (Genbank: | NAPATVCGPKLSTDLIKNQCVNFNFNGLTGTGVLTPSS |
| | ATO98132) | KRFQPFQQFGRDVSDFTDSVRDPKTSEIL |
| 63 | Bat SARS | SNFRVSPSTEVVRFPNITNLCPFGQVFNASNFPSVYAWERLRI |
| | coronavirus | SDCVADYAVLYNSSSSFSTFKCYGVSPTKLNDLCFSS |
| | BtKY72 | VYADYFVVKGDDVRQIAPAQTGVIADYNYKLPDDFTGCVLAW |
| | S protein | NTNSVDSKSGNNFYYRLFRHGKIKPYERDISNVLYNSA |
| | RBD | GGTCSSISQLGCYEPLKSYGFTPTVGVGYQPYRVVVLSFELLN |
| | (Genbank: | APATVCGPKKSTELVKNKCVNFNFNGLTGTGVLTSST |
| | APO40579) | KKFQPFQQFGRDVSDFTDSVRDPKTFEIL |
| 64 | SARS-like | SNFRVTPTTEVVRFPNITKLCPFDQVFNASSFPSVYAWERVRI |
| | coronavirus | TDCVANYAVLYNSSVSFSTFQCYGVSPTKLNDLCFSS |
| | BatCoV/BB9904/ | VYADYFIVKGDDVRQIAPSQTGVIADYNYKLPDDFTGCVIAWN |
| | BGR/2008 | TNALDSNKDFYYRLFRHGKIKPYGRDLSNIPYSPSGT |
| | S protein | CSTINNLNCFAPLKSYGFTQSSGISFQPYRVVVLSFELLNAPAT |
| | RBD | VCGPKQSTELVKDKCVNFNFNGLTGTGVLTSSSKKF |
| | (Genbank: | QPFQQFGRDVSDFTDSVRDPKTLEIL |
| | ALJ94036) | |
| 65 | Bat | SNFRVTPTTEVVRFPNITQLCPFNEVFNITSFPSVYAWERMRIT |
| | coronavirus | NCVADYSVLYNSSASFSTFQCYGVSPTKLNDLCFSS |
| | BM48- | VYADYFVVKGDDVRQIAPAQTGVIADYNYKLPDDFTGCVIAWN |
| | 31/BGR/2008 | TNSLDSSNEFFYRRFRHGKIKPYGRDLSNVLFNPSGG |
| | S protein | TCSAEGLNCYKPLASYGFTQSSGIGFQPYRVVVLSFELLNAPA |
| | RBD | TVCGPKQSTELVKNKCVNFNFNGLTGTGVLTNSTKKF |
| | (Genbank: | QPFQQFGRDVSDFTDSVRDPKTLEIL |
| | YP_003858584) | |
| 66 | Pangolin | SNFRVQPTESIVRFPNITNLCPFGEVFNATTFASVYAWNRKRIS |
| | coronavirus | NCVADYSVLYNSTSFSTFKCYGVSPTKLNDLCFTNV |
| | cDNA8-S | YADSFVVRGDEVRQIAPGQTGRIADYNYKLPDDFTGCVIAWN |
| | S protein | SNNLDSKVGGNYNYLYRLFRKSNLKPFERDISTEIYQA |
| | RBD | GSTPCNGVEGFNCYFPLQSYGFHPTNGVGYQPYRVVVLSFEL |
| | (Genbank: | LNAPATVCGPKQSTNLVKNKCVNFNFNGLTGTGVLTES |
| | QLR06864) | SKKFLPFQQFGRDIADTTDAVRDPQTLEIL |
| 67 | SARS-CoV2 | SNFRVQPTESIVRFPNITNLCPFGEVFNATRFASVYAWNRKRI |
| | S protein | SNCVADYSVLYNSASFSTFKCYGVSPTKLNDLCFTNV |
| | RBD | YADSFVIRGDEVRQIAPGQTGKIADYNYKLPDDFTGCVIAWNS |
| | (Genbank: | NNLDSKVGGNYNYLYRLFRKSNLKPFERDISTEIYQA |
| | YP_009724390) | GSTPCNGVEGFNCYFPLQSYGFQPTNGVGYQPYRVVVLSFE |
| | | LLHAPATVCGPKKSTNLVKNKCVNFNFNGLTGTGVLTES |
| | | NKKFLPFQQFGRDIADTTDAVRDPQTLEIL |
| 68 | SARS-CoV2 | SNFRVQPTESIVRFPNITNLCPFGEVFNATRFASVYAWNRKRI |
| | VOC May 01 | SNCVADYSFLYNSASFSTFKCYGVSLTKLNDLCFTNV |
| | RBD | YADSFVIRGDEVRQIAPGKTGNIADYNYKLPDDFTGCVIAWNS |
| | | KKLDSKVGGNYKYRFRLFRKSNLKPFERDISTEIYQA |
| | | GNKPCNGVKGFNCYSPLQPYGFQPTYGVGYQPYRVVVLSFE |
| | | LLHSPSTVCGPKKSTNLVKNKCVNFNFNGLIGTGVLTES |
| | | NKNFLPFQQFGRDIDDITDAVRDPQTLDIL |
| 69 | SARS-CoV2 | SNFRVQPTESIVRFPNITNLCPFGEVFNATRFASVYAWNRKRI |
| | VOC | SNCVADYSFLYNSASFSTFKCYGVSLTKLNDLCFTNV |
| | S protein | YADSFVIRGDEVRQIAPGQTGNIADYNYKLPDDFTGCVIAWNS |
| | RBD | KKLDSKVGGNYNYRFRLFRKSNLKPFERDISTEIYQA |
| | (Genbank: | GNKPCNGVKGFNCYFPLQPYGFQPTYGVGYQPYRVVVLSFE |
| | YP_009724390) | LLHSPSTVCGPKKSTNLVKNKCVNFNFNGLTGTGVLTES |
| | | NKKFLPFQQFGRDIDDITDAVRDPQTLEIL |
| 70 | Bat | SNFRVQPTDSIVRFPNITNLCPFGEVFNATTFASVYAWNRKRI |
| | coronavirus | SNCVADYSVLYNSTSFSTFKCYGVSPTKLNDLCFTNV |
| | RaTG13 | YADSFVITGDEVRQIAPGQTGKIADYNYKLPDDFTGCVIAWNS |
| | S protein | KHIDAKEGGNFNYLYRLFRKANLKPFERDISTEIYQA |
| | RBD | GSKPCNGQTGLNCYYPLYRYGFYPTDGVGHQPYRVVVLSFE |
| | (Genbank: | LLNAPATVCGPKKSTNLVKNKCVNFNFNGLTGTGVLTES |
| | QHR63300) | NKKFLPFQQFGRDIADTTDAVRDPQTLEIL |
| 71 | Pangolin | SNFRVQPTISIVRFPNITNLCPFGEVFNASKFASVYAWNRKRIS |
| | coronavirus | NCVADYSVLYNSTSFSTFKCYGVSPTKLNDLCFTNV |
| | GX-P1E | YADSFVVKGDEVRQIAPGQTGVIADYNYKLPDDFTGCVIAWNS |
| | S protein | VKQDALTGGNYLYRLFRKSKLKPFERDISTEIYQAGS |
| | RBD | TPCNGQVGLNCYYPLERYGFHPTTGVNYQPFRVVVLSFELLN |
| | (Genbank: | GPATVCGPKLSTTLVKDKCVNFNFNGLTGTGVLTTSKK |
| | QIA48623) | QFLPFQQFGRDISDTTDAVRDPQTLEIL |
| 72 | Pangolin | SNFRVQPTISIVRFPNITNLCPFGEVENASKFASVYAWNRKRIS |
| | coronavirus | NCVADYSVLYNSTSFSTFKCYGVSPTKLNDLCFTNV |
| | GX-P2V | YADSFVVKGDEVRQIAPGQTGVIADYNYKLPDDFTGCVIAWNS |
| | S protein | VKQDALTGGNYGYLYRLFRKSKLKPFERDISTEIYQA |
| | RBD | GSTPCNGQVGLNCYYPLERYGFHPTTGVNYQPFRVVVLSXEL |
| | (Genbank: | LNGPATVCGPKLSTTLVKDKCVNFNFNGLTGTGVLTTS |
| | QIQ54048) | KKQFLPFQQFGRDISDTTDAVRDPQTLEIL |
| 73 | Pangolin | SNFRVQPTISIVRFPNITNLCPFGEVFNASKFASVYAWNRKRIS |
| | coronavirus | NCVADYSVLYNSTSFSTFKCYGVSPTKLNDLCFTNV |
| | GX-P4L | YADSFVVKGDEVRQIAPGQTGVIADYNYKLPDDFTGCVIAWNS |
| | S protein | VKQDALTGGNYGYLYRLFRKSKLKPFERDISTEIYQA |
| | RBD | GSTPCNGQVGLNCYYPLERYGFHPTTGVNYQPFRVVVLSFEL |
| | (Genbank: | LNGPATVCGPKLSTTLVKDKCVNFNFNGLTGTGVLTTS |
| | QIA48614) | KKQFLPFQQFGRDISDTTDAVRDPQTLEIL |
| 74 | Pangolin | SNFRVQPTISIVRFPNITNLCPFGEVFNASKFASVYAWNRKRIS |
| | coronavirus | NCVADYSVLYNSTSFSTFKCYGVSPTKLNDLCFTNV |
| | GX-P5E | YADSFVVKGDEVRQIAPGQTGVIADYNYKLPDDFTGCVIAWNS |
| | S protein | VKQDALTGDNYGYLYRLFRKSKLKPFERDISTEIYQA |
| | RBD | GSTPCNGQVGLNCYYPLERYGFHPTTGVNYQPFRVVVLSFEL |
| | (Genbank: | LNGPATVCGPKLSTTLVKDKCVNFNFNGLTGTGVLTTS |
| | QIA48641) | KKQFLPFQQFGRDISDTTDAVRDPQTLEIL |
| 75 | Bat SARS | SNFRVQPQDTVVRFPNITNLCPFSEVFNATTFASVYAWNRKRI |
| | coronavirus | SNCVADYSVLYNSTSFSTFQCYGVSSTKLNDLCFTNV |
| | Rc-0319 | YADSFVVRGDEVRQIAPGQTGVIADYNYKLPDDFTGCVLAWN |
| | S protein | SRNQDASTSGNFNYYYRIWRSEKLRPFERDIAHYDYQV |
| | RBD | GTQFKSSLKNYGFYSSAGDSHQPYRVVVLSFELLNAPATVCG |
| | (Genbank: | PKQSTELIKNKCVNFNFNGLTGTGVLTDSNKKFQSFQQ |
| | BCG66627) | FGRDVSDFTDSVKDPKTLEVL |
| 76 | Bat SARS CoV | SNFRTSPTTQVVRFPNITNLCPFGEVFNATTFASVYAWNRRRI |
| | RShSTT182 | SNCVADYSVLYNTTSFSTFKCYGVSPTKLNDLCFTNV |
| | S protein | YADSFVVRGDEVRQIAPGQTGKIADYNYKLPDDFMGCVIAWN |
| | RBD | SISLDAGGSYYYRLFRKSVLKPFERDISTQLYQAGDKP |
| | (Genbank: | CSVEGPDCYYPLQSYYFQSTNGVGYQPYRVVVLSFELLNAPA |
| | RShSTT182/ | TVCGPKKSTHLVVNKCVNFNFNGLTGTGVLTSSTKKFL |
| | 2010\|EPI_ISL_ | PFQQFGRDVADTTNAVRDPQTLEVL |
| | 852604) | |
| 77 | SARS-related | MFIFILFLTLTSGSDLDRCTTFDDVQAPNYTQHTSSMRGVYYP |
| | coronavirus | DEIFRSDTLYLTQDLFLPFYSNVTGFHTINHTFGNPV |
| | Spike | IPFKDGIYFAATEKSNVVRGWVFGSTMNNKSQSVIIINNSTNVV |
| | glycoprotein | IRACNFELCDNPFFAVSKPMGTQTHTMIFDNAFNCT |
| | (Genbank: | FEYISDAFSLDVSEKSGNFKHLREFVFKNKDGFLYVYKGYQPI |
| | ABD72984) | DVVRDLPSGFNTLKPIFKLPLGINITNFRAILTAFSP |
| | | AQDIWGTSAAAYFVGYLKPTTFMLKYDENGTITDAVDCSQNPL |
| | | AELKCSVKSFEIDKGIYQTSNFRVVPSGDVVRFPNIT |
| | | NLCPFGEVFNATKFPSVYAWERKKISNCVADYSVLYNSTFFST |
| | | FKCYGVSATKLNDLCFSNVYADSFVVKGDDVRQIAPG |
| | | QTGVIADYNYKLPDDFMGCVLAWNTRNIDATSTGNYNYKYRY |
| | | LRHGKLRPFERDISNVPFSPDGKPCTPPALNCYWPLND |
| | | YGFYTTTGIGYQPYRVVVLSFELLNAPATVCGPKLSTDLIKNQC |
| | | VNFNFNGLTGTGVLTPSSKRFQPFQQFGRDVSDFTD |
| | | SVRDPKTSEILDISPCSFGGVSVITPGTNASSEVAVLYQDVNCT |
| | | DVSTAIHADQLTPAWRIYSTGNNVFQTQAGCLIGAE |
| | | HVDTSYECDIPIGAGICASYHTVSLLRSTSQKSIVAYTMSLGAD |
| | | SSIAYSNNTIAIPTNFSISITTEVMPVSMAKTSVDC |
| | | NMYICGDSTECANLLLQYGSFCTQLNRALSGIAAEQDRNTREV |
| | | FAQVKQMYKTPTLKYFGGFNFSQILPDPLKPTKRSFI |
| | | EDLLFNKVTLADAGFMKQYGECLGDINARDLICAQKFNGLTVL |
| | | PPLLTDDMIAAYTAALVSGTATAGWTFGAGAALQIPF |
| | | AMQMAYRFNGIGVTQNVLYENQKQIANQFNKAISQIQESLTTT |
| | | STALGKLQDVVNQNAQALNTLVKQLSSNFGAISSVLN |
| | | DILSRLDKVEAEVQIDRLITGRLQSLQTYVTQQLIRAAEIRASAN |
| | | LAATKMSECVLGQSKRVDFCGKGYHLMSFPQAAPH |
| | | GVVFLHVTYVPSQERNFTTAPAICHEGKAYFPREGVFVFNGTS |
| | | WFITQRNFFSPQIITTDNTFVSGNCDVVIGIINNTVY |
| | | DPLQPELDSFKEELDKYFKNHTSPDVDLGDISGINASVVNIQKE |
| | | IDRLNEVAKNLNESLIDLQELGKYEQYIKWPWYVWL |
| | | GFIAGLIAIVMVTILLCCMTSCCSCLKGACSCGSCCKFDEDDSE |
| | | PVLKGVKLHYT |
| 78 | SARS | MFIFLLFLTLTSGSDLDRCTTFDDVQAPNYTQHTSSMRGVYYP |
| | coronavirus | DEIFRSDTLYLTQDLFLPFYSNVTGFHTINHTFGNPV |
| | wtic-MB | IPFKDGIYFAATEKSNVVRGWVFGSTMNNKSQSVIIINNSTNVV |
| | Spike | IRACNFELCDNPFFAVSKPMGTQTHTMIFDNAFNCT |
| | glycoprotein | FEYISDAFSLDVSEKSGNFKHLREFVFKNKDGFLYVYKGYQPI |
| | precursor | DVVRDLPSGFNTLKPIFKLPLGINITNFRAILTAFSP |
| | (Genbank: | AQDIWGTSAAAYFFGYLKPTTFMLKYDENGTITDAVDCSQNPL |
| | ACZ72093) | AELKCSVKSFEIDKGIYQTSNFRVVPSGDVVRFPNIT |
| | | NLCPFGEVFNATKFPSVYAWERKKISNCVADYSVLYNSTFFST |
| | | FKCYGVSATKLNDLCFSNVYADSFVVKGDDVRQIAPG |
| | | QTGVIADYNYKLPDDFMGCVLAWNTRNIDATSTGNYNYKYRY |
| | | LRHGKLRPFERDISNVPFSPDGKPCTPPALNCYWPLND |
| | | YGFYTTTGIGYQPYRVVVLSFELLNAPATVCGPKLSTDLIKNQC |
| | | VNFNFNGLTGTGVLTPSSKRFQPFQQFGRDVSDFTD |
| | | SVRDPKTSEILDISPCSFGGVSVITPGTNASSEVAVLYQDVNCT |
| | | DVSTAIHADQLTPAWRIYSTGNNVFQTQAGCLIGAE |
| | | HVDTSYECDIPIGAGICASYHTVSLLRSTSQKSIVAYTMSLGAD |
| | | SSIAYSNNTIAIPTNFSISITTEVMPVSMAKTSVDC |
| | | NMYICGDSTECANLLLQYGSFCTQLNRALSGIAAEQDRNTREV |
| | | FAQVKQMYKTPTLKYFGGFNFSQILPDPLKPTKRSFI |
| | | EDLLFNKVTLADAGFMKQYGECLGDINARDLICAQKFNGLTVL |
| | | PPLLTDDMIAAYTAALVSGTATAGWTFGAGAALQIPF |
| | | AMQMAYRFNGIGVTQNVLYENQKQIANQFNKAISQIQESLTTT |
| | | STALGKLQDVVNQNAQALNTLVKQLSSNFGAISSVLN |
| | | DILSRLDKVEAEVQIDRLITGRLQSLQTYVTQQLIRAAEIRASAN |
| | | LAATKMSECVLGQSKRVDFCGKGYHLMSFPQAAPH |
| | | GVVFLHVTYVPSQERNFTTAPAICHEGKAYFPREGVFVFNGTS |
| | | WFITQRNFFSPQIITTDNTFVSGNCDVVIGIINNTVY |
| | | DPLQPELDSFKEELDKYFKNHTSPDVDLGDISGINASVVNIQKE |
| | | IDRLNEVAKNLNESLIDLQELGKYEQYIKWPWYVWL |
| | | GFIAGLIAIVMVTILLCCMTSCCSCLKGACSCGSCCKFDEDDSE |
| | | PVLKGVKLHYT |
| 79 | SARS | MFIFLLFLTLTSGSDLDRCTTFDDVQAPNYTQHTSSMRGVYYP |
| | coronavirus | DEIFRSDTLYLTQDLFLPFYSNVTGFHTINHTFGNPV |
| | Shanghai LY | IPFKDGIYFAATEKSNVVRGWVFGSTMNNKSQSVIIISNSTNVVI |
| | Spike | RACNFELCDNPFFAVSKPMGTQTHTMIFDNAFNCT |
| | glycoprotein | FEYISDAFSLDVSEKSGNFKHLREFVFKNKDGSLYVYKGYQPI |
| | (Genbank: | DVVRDLPSGFNTLKPIFKLPLGINITNFRAILTAFSP |
| | AAP82968) | AQDIWGTSAAAYFVGYLKPTTFMLKYDENGTITDAVDCSQNPL |
| | | AELKCSVKSFEIDKGIYQTSNFRVVPSGDVVRFPNIT |
| | | NLCPFGEVFNATKFPSVYAWERKKISNCVADYSVLYNSTFFST |
| | | FKCYGVSATKLNDLCFSNVYADSFVVKGDDVRQIAPG |
| | | QTGVIADYNYKLPDDFMGCVLAWNTGNIDATSTGNYDYKYRY |
| | | LRHGKLRPFERDISNVPFSPDGKPCTPPALNCYWPLND |
| | | YGFYTTTGIGYQPYRVVVLSFELLNAPATVCGPKLSTDLIKNQC |
| | | VNFNFNGLTGTGVLTPSSKRFQPFQQFGRDVSDFTD |
| | | SVRDPKTSEILDISPCSFGGVSVITPGTNASSEVAVLYQDVNCT |
| | | DVSTAIHADQLTPAWRIYSTGNNVFQTQAGCLIGAE |
| | | HVDTSYECDIPIGAGICASYHTVSLLRSTSQKSIVAYTMSLGAD |
| | | SSIAYSNNTIAIPTNFSISITTEVMPVSMAKTSVDC |
| | | NMYICGDSTECANLLLQYGSFCTQLNRALSGIAAEQDRNTREV |
| | | FAQVKQMYKTPTLKYFGGFNFSQILPDPLKPTKRSFI |
| | | EDLPFNKVTLADAGFMKQYGECLGDINARDLICAQKFNGLTVL |
| | | PPLLTDDMIAAYTAALVSGTATAGWTFGAGAALQIPF |
| | | AMQMAYRFNGIGVTQNVLYENQKQIANQFNKAISQIQESLTTT |
| | | STALGKLQDVVNQNAQALNTLVKQLSSNFGAISSVLN |
| | | DILSRLDKVEAEVQIDRLITGRLQSLQTYVTQQLIRAAGIRASAN |
| | | LAATKMSECVLGQSKRVDFCGKGYHLMSFPQAAPH |
| | | GVVFLHVTYVPSQERNFTTAPAICHEGKAYFPREGVFVFNGTS |
| | | WFITQRNFFSPQIITTDNTFVSGNCDVVIGIINNTVY |
| | | DPLQPELDSFKEELDKYFKNHTSPDVDLGDISGINASVVNIQKE |
| | | IDRLNEVAKNLNESLIDLQELGKYEQYIKWPWYVWL |
| | | GFIAGLIAIVMVTILLCCMTSCCSCLKGACSCGSCCKFDEDDSE |
| | | PVLKGVKLHYT |
| 80 | SARS | MFIFLLFLTLTSGSDLDRCTTFDDVQAPNYTQHTSSMRGVYYP |
| | coronavirus | DEIFRSDTLYLTQDLFLPFYSNVTGFHTINHTFGNPV |
| | HKU-39849 | IPFKDGIYFAATEKSNVVRGWVFGSTMNNKSQSVIIINNSTNVV |
| | Spike | IRACNFELCDNPFFAVSKPMGTQTHTMIFDNAFNCT |
| | glycoprotein | FEYISDAFSLDVSEKSGNFKHLREFVFKNKDGFLYVYKGYQPI |
| | precursor | DVVRDLPSGFNTLKPIFKLPLGINITNFRAILTAFSP |
| | (Genbank: | AQDIWGTSAAAYFVGYLKPTTFMLKYDENGTITDAVDCSQNPL |
| | ADC35483) | AELKCSVKSFEIDKGIYQTSNFRVVPSGDVVRFPNIT |
| | | NLCPFGEVFNATKFPSVYAWERKKISNCVADYSVLYNSTFFST |
| | | FKCYGVSATKLNDLCFSNVYADSFVVKGDDVRQIAPG |
| | | QTGVIADYNYKLPDDFMGCVLAWNTRNIDATSTGNYNYKYRY |
| | | LRHGKLRPFERDISNVPFSPDGKPCTPPALNCYWPLND |
| | | YGFYTTTGIGYQPYRVVVLSFELLNAPATVCGPKLSTDLIKNQC |
| | | VNFNFNGLTGTGVLTPSSKRFQPFQQFGRDVSDFTD |
| | | SVRDPKTSEILDISPCSFGGVSVITPGTNASSEVAVLYQDVNCT |
| | | DVSTAIHADQLTPAWRIYSTGNNVFQTQAGCLIGAE |
| | | HVDTSYECDIPIGAGICASYHTVSLLRSTSQKSIVAYTMSLGAD |
| | | SSIAYSNNTIAIPTNFSISITTEVMPVSMAKTSVDC |
| | | NMYICGDSTECANLLLQYGSFCTQLNRALSGIAAEQDRNTREV |
| | | FAQVKQMYKTPTLKYFGGFNFSQILPDPLKPTKRSFI |
| | | EDLLFNKVTLADAGFMKQYGECLGDINARDLICAQKFNGLTVL |
| | | PPLLTDDMIAAYTAALVSGIATAGWTFGAGAALQIPF |
| | | AMQMAYRFNGIGVTQNVLYENQKQIANQFNKAISQIQESLTTT |
| | | STALGKLQDVVNQNAQALNTLVKQLSSNFGAISSVLN |
| | | DILSRLDKVEAEVQIDRLITGRLQSLQTYVTQQLIRAAEIRASAN |
| | | LAATKMSECVLGQSKRVDFCGKGYHLMSFPQAAPH |
| | | GVVFLHVTYVPSQERNFTTAPAICHEGKAYFPREGVFVFNGTS |
| | | WFITQRNFFSPQIITTDNTFVSGNCDVVIGIINNTVY |
| | | DPLQPELDSFKEELDKYFKNHTSPDVDLGDISGINASVVNIQKE |
| | | IDRLNEVAKNLNESLIDLQELGKYEQYIKWPWYVWL |
| | | GFIAGLIAIVMVTILLCCMTSCCSCLKGACSCGSCCKFDEDDSE |
| | | PVLKGVKLHYT |
| 81 | SARS-related | MLIFLLFLTLTSGSDLDRCTTFDDVQAPNYTQHTSSMRGVYYP |
| | coronavirus | DEIFRSDTLYLTQDLFLPFYSNVTGFHTINHTFGNPV |
| | Spike | IPFKDGIYFAATEKSNVVRGWVFGSTMNNKSQSVIIINNSTNVV |
| | glycoprotein | IRACNFELCDNPFFAVSKPMGTQTHTMIFDNAFNCT |
| | (Genbank: | FEYISDAFSLDVSEKSGNFKHLREFVFKNKDGFLYVYKGYQPI |
| | ABD72982) | DVVRDLPSGFNTLKPIFKLPLGINITNFRAILTAFSP |
| | | AQDIWGTSAAAYFVGYLKPTTFMLKYDENGTITDAVDCSQNPL |
| | | AELKCSVKSFEIDKGIYQTSNFRVVPSGDVVRFPNIT |
| | | NLCPFGEVFNATKFPSVYAWERKKISNCVADYSVLYNSTFFST |
| | | FKCYGVSATKLNDLCFSNVYADSFVVKGDDVRQIAPG |
| | | QTGVIADYNYKLPDDFMGCVLAWNTRNIDATSTGNYNYKYRY |
| | | LRHGKLRPFERDISNVPFSPDGKPCTPPALNCYWPLND |
| | | YGFYTTTGIGYQPYRVVVLSFELLNAPATVCGPKLSTDLIKNQC |
| | | VNFNFNGLTGTGVLTPSSKRFQPFQQFGRDVSDFTD |
| | | SVRDPKTSEILDISPCSFGGVSVITPGTNASSEVAVLYQDVNCT |
| | | DVSTAIHADQLTPAWRIYSTGNNVFQTQAGCLIGAE |
| | | HVDTSYECDIPIGAGICASYHTVSLLRSTSQKSIVAYTMSLGAD |
| | | SSIAYSNNTIAIPTNFSISITTEVMPVSMAKTSVDC |
| | | NMYICGDSTECANLLLQYGSFCTQLNRALSGIAAEQDRNTREV |
| | | FAQVKQMYKTPTLKYFGGFNFSQILPDPLKPTKRSFI |
| | | EDLLFNKVTLADAGFMKQYGECLGDINARDLICAQKFNGLTVL |
| | | PPLLTDDMIAAYTAALVSGTATAGWTFGAGAALQIPF |
| | | AMQMAYRFNGIGVTQNVLYENQKQIANQFNKAISQIQESLTTT |
| | | STALGKLQDVVNQNAQALNTLVKQLSSNFGAISSVLN |
| | | DILSRLDKVEAEVQIDRLITGRLQSLQTYVTQQLIRAAEIRASAN |
| | | LAATKMSECVLGQSKRVDFCGKGYHLMSFPQAAPH |
| | | GVVFLHVTYVPSQERNFTTAPAICHEGKAYFPREGVFVFNGTS |
| | | WFITQRNFFSPQIITTDNTFVSGNCDVVIGIINNTVY |
| | | DPLQPELDSFKEELDKYFKNHTSPDVDLGDISGINASVVNIQKE |
| | | IDRLNEVAKNLNESLIDLQELGKYEQYIKWPWYVWL |
| | | GFIAGLIAIVMVTILLCCMTSCCSCLKGACSCGSCCKFDEDDSE |
| | | PVLKGVKLHYT |
| 82 | SARS | MFIFLLFLTLTSGSDLDRCTTFDDVQAPNYTQHTSSMRGVYYP |
| | coronavirus | DEIFRSDTLYLTQDLFLPFYSNVTGFHTINHTFGNPV |
| | Tor2 | IPFKDGIYFAATEKSNVVRGWVFGSTMNNKSQSVIIINNSTNVV |
| | Spike | IRACNFELCDNPFFAVSKPMGTQTHTMIFDNAFNCT |
| | glycoprotein | FEYISDAFSLDVSEKSGNFKHLREFVFKNKDGFLYVYKGYQPI |
| | precursor | DVVRDLPSGFNTLKPIFKLPLGINITNFRAILTAFSP |
| | (Genbank: | AQDIWGTSAAAYFVGYLKPTTFMLKYDENGTITDAVDCSQNPL |
| | AFR58672) | AELKCSVKSFEIDKGIYQTSNFRVVPSGDVVRFPNIT |
| | | NLCPFGEVFNATKFPSVYAWERKKISNCVADYSVLYNSTFFST |
| | | FKCYGVSATKLNDLCFSNVYADSFVVKGDDVRQIAPG |
| | | QTGVIADYNYKLPDDFMGCVLAWNTRNIDATSTGNYNYKYRY |
| | | LRHGKLRPFERDISNVPFSPDGKPCTPPALNCYWPLND |
| | | YGFYTTTGIGYQPYRVVVLSFELLNAPATVCGPKLSTDLIKNQC |
| | | VNFNFNGLTGTGVLTPSSKRFQPFQQFGRDVSDFTD |
| | | SVRDPKTSEILDISPCXFGGVSVITPGTNASSEVAVLYQDVNCT |
| | | DVSTAIHADQLTPAWRIYSTGNNVFQTQAGCLIGAE |
| | | HVDTSYECDIPIGAGICASYHTVSLLRSTSQKSIVAYTMSLGAD |
| | | SSIAYSNNTIAIPTNFSISITTEVMPVSMAKTSVDC |
| | | NMYICGDSTECANLLLQYGSFCTQLNRALSGIAAEQDRNTREV |
| | | FAQVKQMYKTPTLKYFGGFNFSQILPDPLKPTKRSFI |
| | | EDLLFNKVTLADAGFMKQYGECLGDINARDLICAQKFNGLTVL |
| | | PPLLTDDMIAAYTAALVSGTATAGWTFGAGAALQIPF |
| | | AMQMAYRFNGIGVTQNVLYENQKQIANQFNKAISQIQESLTTT |
| | | STALGKLQDVVNQNAQALNTLVKQLSSNFGAISSVLN |
| | | DILSRLDKVEAEVQIDRLITGRLQSLQTYVTQQLIRAAEIRASAN |
| | | LAATKMSECVLGQSKRVDFCGKGYHLMSFPQAAPH |
| | | GVVFLHVTYVPSQERNFTTAPAICHEGKAYFPREGVFVFNGTS |
| | | WFITQRNFFSPQIITTDNTFVSGNCDVVIGIINNTVY |
| | | DPLQPELDSFKEELDKYFKNHTSPDVDLGDISGINASVVNIQKE |
| | | IDRLNEVAKNLNESLIDLQELGKYEQYIKWPWYVWL |
| | | GFIAGLIAIVMVTILLCCMTSCCSCLKGACSCGSCCKFDEDDSE |
| | | PVLKGVKLHYT |
| 83 | SARS | MFIFLLFLTLTSGSDLDRCTTFDDVQAPNYTQHTSSMRGVYYP |
| | coronavirus | DEIFRSDTLYLTQDLFLPFYSNVTGFHTINHTFGNPV |
| | Tor2 | IPFKDGIYFAATEKSNVVRGWVFGSTMNNKSQSVIIINNSTNVV |
| | Spike | IRACNFELCDNPFFAVSKPMGTQTHTMIFDNAFNCT |
| | glycoprotein | FEYISDAFSLDVSEKSGNFKHLREFVFKNKDGFLYVYKGYQPI |
| | precursor | DVVRDLPSGFNTLKPIFKLPLGINITNFRAILTAFSP |
| | (Genbank: | AQDIWGTSAAAYFVGYLKPTTFMLKYDENGTITDAVDCSQNPL |
| | AFR58714) | AELKCSVKSFEIDKGIYQTSNFRVVPSGDVVRFPNIT |
| | | NLCPFGEVFNATKFPSVYAWERKKISNCVADYSVLYNSTFFST |
| | | FKCYGVSATKLNDLCFSNVYADSFVVKGDDVRQIAPG |
| | | QTGVIADYNYKLPDDFMGCVLAWNTRNIDATSTGNYNYKYRY |
| | | LXHGKLRPFERDISNVPFSPDGKPCTPPALNCYWPLND |
| | | YGFYTTTGIGYQPYRVVVLSFELLNAPATVCGPKLSTDLIKNQC |
| | | VNFNFNGLTGTGVLTPSSKRFQPFQQFGRDVSDFTD |
| | | SVRDPKTSEILDISPCXFGGVSVITPGTNASSEVAVLYQDVNCT |
| | | DVSTAIHADQLTPAWRIYSTGNNVFQTQAGCLIGAE |
| | | HVDTSYECDIPIGAGICASYHTVSLLRSTSQKSIVAYTMSLGAD |
| | | SSIAYSNNTIAIPTNFSISITTEVMPVSMAKTSVDC |
| | | NMYICGDSTECANLLLQYGSFCTQLNRALSGIAAEQDRNTREV |
| | | FAQVKQMYKTPTLKYFGGFNFSQILPDPLKPTKRSFI |
| | | EDLLFNKVTLADAGFMKQYGECLGDINARDLICAQKFNGLTVL |
| | | PPLLTDDMIAAYTAALVSGTATAGWTFGAGAALQIPF |
| | | AMQMAYRFNGIGVTQNVLYENQKQIANQFNKAISQIQESLTTT |
| | | STALGKLQDVVNQNAQALNTLVKQLSSNFGAISSVLN |
| | | DILSRLDKVEAEVQIDRLITGRLQSLQTYVTQQLIRAAEIRASAN |
| | | LAATKMSECVLGQSKRVDFCGKGYHLMSFPQAAPH |
| | | GVVFLHVTYVPSQERNFTTAPAICHEGKAYFPREGVFVFNGTS |
| | | WFITQRNFFSPQIITTDNTFVSGNCDVVIGIINNTVY |
| | | DPLQPELDSFKEELDKYFKNHTSPDVDLGDISGINASVVNIQKE |
| | | IDRLNEVAKNLNESLIDLQELGKYEQYIKWPWYVWL |
| | | GFIAGLIAIVMVTILLCCMTSCCSCLKGACSCGSCCKFDEDDSE |
| | | PVLKGVKLHYT |
| 84 | SARS | MFIFLLFLTLTSGSDLDRCTTFDDVQAPNYTQHTSSMRGVYYP |
| | coronavirus | DEIFRSDTLYLTQDLFLPFYSNVTGFHTINHTFGNPV |
| | Tor2 | IPFKDGIYFAATEKSNVVRGWVFGSTMNNKSQSVIIINNSTNVV |
| | Spike | IRACNFELCDNPFFAVSKPMGTQTHTMIFDNAFNCT |
| | glycoprotein | FEYISDAFSLDVSEKSGNFKHLREFVFKNKDGFLYVYKGYQPI |
| | (Genbank: | DVVRDLPSGFNTLKPIFKLPLGINITNFRAILTAFSP |
| | YP_009825051) | AQDIWGTSAAAYFVGYLKPTTFMLKYDENGTITDAVDCSQNPL |
| | | AELKCSVKSFEIDKGIYQTSNFRVVPSGDVVRFPNIT |
| | | NLCPFGEVFNATKFPSVYAWERKKISNCVADYSVLYNSTFFST |
| | | FKCYGVSATKLNDLCFSNVYADSFVVKGDDVRQIAPG |
| | | QTGVIADYNYKLPDDFMGCVLAWNTRNIDATSTGNYNYKYRY |
| | | LRHGKLRPFERDISNVPFSPDGKPCTPPALNCYWPLND |
| | | YGFYTTTGIGYQPYRVVVLSFELLNAPATVCGPKLSTDLIKNQC |
| | | VNFNFNGLTGTGVLTPSSKRFQPFQQFGRDVSDFTD |
| | | SVRDPKTSEILDISPCAFGGVSVITPGTNASSEVAVLYQDVNCT |
| | | DVSTAIHADQLTPAWRIYSTGNNVFQTQAGCLIGAE |
| | | HVDTSYECDIPIGAGICASYHTVSLLRSTSQKSIVAYTMSLGAD |
| | | SSIAYSNNTIAIPTNFSISITTEVMPVSMAKTSVDC |
| | | NMYICGDSTECANLLLQYGSFCTQLNRALSGIAAEQDRNTREV |
| | | FAQVKQMYKTPTLKYFGGFNFSQILPDPLKPTKRSFI |
| | | EDLLFNKVTLADAGFMKQYGECLGDINARDLICAQKFNGLTVL |
| | | PPLLTDDMIAAYTAALVSGTATAGWTFGAGAALQIPF |
| | | AMQMAYRFNGIGVTQNVLYENQKQIANQFNKAISQIQESLTTT |
| | | STALGKLQDVVNQNAQALNTLVKQLSSNFGAISSVLN |
| | | DILSRLDKVEAEVQIDRLITGRLQSLQTYVTQQLIRAAEIRASAN |
| | | LAATKMSECVLGQSKRVDFCGKGYHLMSFPQAAPH |
| | | GVVFLHVTYVPSQERNFTTAPAICHEGKAYFPREGVFVFNGTS |
| | | WFITQRNFFSPQIITTDNTFVSGNCDVVIGIINNTVY |
| | | DPLQPELDSFKEELDKYFKNHTSPDVDLGDISGINASVVNIQKE |
| | | IDRLNEVAKNLNESLIDLQELGKYEQYIKWPWYVWL |
| | | GFIAGLIAIVMVTILLCCMTSCCSCLKGACSCGSCCKFDEDDSE |
| | | PVLKGVKLHYT |
| 85 | SARS | MFIFLLFLTLTSGSDLDRCTTFDDVQAPNYTQHTSSMRGVYYP |
| | coronavirus | DEIFRSDTLYLTQDLFLPFYSNVTGFHTINHTFGNPV |
| | ShanghaiQXC1 | IPFKDGIYFAATEKSNVVRGWVFGSTMNNKSQSVIIINNSTNVV |
| | Spike | IRACNFELCDNPFFAVSKPMGTQTHTMIFDNAFNCT |
| | (Genbank: | FEYISDAFSLDVSEKSGNFKHLREFVFKNKDGFLYVYKGYQPI |
| | AAR86788) | DVVRDLPSGFNTLKPIFKLPLGINITNFRAILTAFSP |
| | | AQDIWGTSAAAYFVGYLKPTTFMLKYDENGTITDAVDCSQNPL |
| | | AELKCSVKSFEIDKGIYQTSNFRVVPSGDVVRFPNIT |
| | | NLCPFGEVFNATKFPSVYAWERKKISNCVADYSVLYNSTFFST |
| | | FKCYGVSATKLNDLCFSNVYADSFVVKGDDVRQIAPG |
| | | QTGVIADYNYKLPDDFMGCVLAWNTRNIDATSTGNYNYKYRY |
| | | LRHGKLRPFERDISNVPFSPDGKPCTPPALNCYWPLND |
| | | YGFYTTTGIGYQPYRVVVLSFELLNAPATVCGPKLSTDLIKNQC |
| | | VNFNFNGLTGTGVLTPSSKRFQPFQQFGRDVSDFTD |
| | | SVRDPKTSEILDISPCAFGGVSVITPGTNASSEVAVLYQDVNCT |
| | | NVSAAIHADQLTPAWRIYSTGNNVFQTQAGCLIGAE |
| | | HVDTSYECDIPIGAGICASYHTVSLLRSTSQKSIVAYTMSLGAD |
| | | SSIAYSNNTIAIPTNFSISITTEVMPVSMAKTSVDC |
| | | NMYICGDSTECANLLLQYGSFCTQLNRALSGIAAEQDRNTREV |
| | | FAQVKQMYKTPTLKYFGGFNFSQILPDPLKPTKRSFI |
| | | EDLLFNKVTLADAGFMKQYGECLGDINARDLICAQKFNGLTVL |
| | | PPLLTDDMIAAYTAALVSGTATAGWTFGAGAALQIPF |
| | | AMQMAYRFNGIGVTQNVLYENQKQIANQFNKAISQIQESLTTT |
| | | STALGKLQDVVNQNAQALNTLVKQLSSNFGAISSVLN |
| | | DILSRLDKVEAEVQIDRLITGRLQSLQTYVTQQLIRAAEIRASAN |
| | | LAATKMSECVLGQSKRVDFCGKGYHLMSFPQAAPH |
| | | GVVFLHVTYVPSQERNFTTAPAICHEGKAYFPREGVFVFNGTS |
| | | WFITQRNFFSPQIITTDNTFVSGNCDVVIGIINNTVY |
| | | DPLQPELDSFKGELDKYFKNHTSPDVDLGDISGINASVVNIQK |
| | | EIDRLNEVAKNLNESLIDLQELGKYEQYIKWPWYVWL |
| | | GFIAGLIAIVMVTILLCCMTSCCSCLKGACSCGSCCKFDEDDSE |
| | | PVLKGVKLHYT |
| 86 | SARS | MFIFLLFLTLTSGSDLDRCTTFDDVQAPNYTQHTSSMRGVYYP |
| | Coronavirus | DEIFRSDTLYLTQDLFLPFYSNVTGFHTINHTFGNPV |
| | CDC#200301157 | IPFKDGIYFAATEKSNVVRGWVFGSTMNNKSQSVIIINNSTNVV |
| | S protein | IRACNFELCDNPFFAVSKPMGTQTHTMIFDNAFNCT |
| | (Genbank: | FEYISDAFSLDVSEKSGNFKHLREFVFKNKDGFLYVYKGYQPI |
| | AAU81608) | DVVRDLPSGFNTLKPIFKLPLGINITNFRAILTAFSP |
| | | AQDIWGTSAAAYFVGYLKPTTFMLKYDENGTITDAVDCSQNPL |
| | | AELKCSVKSFEIDKGIYQTSNFRVVPSGDVVRFPNIT |
| | | NLCPFGEVFNATKFPSVYAWERKKISNCVADYSVLYNSTFFST |
| | | FKCYGVSATKLNDLCFSNVYADSFVVKGDDVRQIAPG |
| | | QTGVIADYNYKLPDDFMGCVLAWNTRNIDATSTGNYNYKYRY |
| | | LRHGKLRPFERDISNVPFSPDGKPCTPPALNCYWPLND |
| | | YGFYTTTGIGYQPYRVVVLSFELLNAPATVCGPKLSTDLIKNQC |
| | | VNFNFNGLTGTGVLTPSSKRFQPFQQFGRDVSDFTD |
| | | SVRDPKTSEILDISPCSFGGVSVITPGTNASSEVAVLYQDVNCT |
| | | DVSTAIHADQLTPAWRIYSTGNNVFQTQAGCLIGAE |
| | | HVDTSYECDIPVGAGICASYHTVSLLRSTSQKSIVAYTMSLGA |
| | | DSSIAYSNNTIAIPTNFSISITTEVMPVSMAKTSVDC |
| | | NMYICGDSTECANLLLQYGSFCTQLNRALSGIAAEQDRNTREV |
| | | FAQVKQMYKTPTLKYFGGFNFSQILPDPLKPTKRSFI |
| | | EDLLFNKVTLADAGFMKQYGECLGDINARDLICAQKFNGLTVL |
| | | PPLLTDDMIAAYTAALVSGTATAGWTFGAGAALQIPF |
| | | AMQMAYRFNGIGVTQNVLYENQKQIANQFNKAISQIQESLTTT |
| | | STALGKLQDVVNQNAQALNTLVKQLSSNFGAISSVLN |
| | | DILSRLDKVEAEVQIDRLITGRLQSLQTYVTQQLIRAAEIRASAN |
| | | LAATKMSECVLGQSKRVDFCGKGYHLMSFPQAAPH |
| | | GVVFLHVTYVPSQERNFTTAPAICHEGKAYFPREGVFVFNGTS |
| | | WFITQRNFFSPQIITTDNTFVSGNCDVVIGIINNTVY |
| | | DPLQPELDSFKEELDKYFKNHTSPDVDLGDISGINASVVNIQKE |
| | | IDRLNEVAKNLNESLIDLQELGKYEQYIKWPWYVWL |
| | | GFIAGLIAIVMVTILLCCMTSCCSCLKGACSCGSCCKFDEDDSE |
| | | PVLKGVKLHYT |
| 87 | SARS | MFIFLLFLTLTSGSDLDRCTTFDDVQAPNYTQHTSSMRGVYYP |
| | coronavirus P2 | DEIFRSDTLYLTQDLFLPFYSNVTGFHTINHTFGNPV |
| | Spike | IPFKDGIYFAATEKSNVVRGWVFGSTMNNKSQSVIIINNSTNVV |
| | glycoprotein | IRACNFELCDNPFFAVSKPMGTQTHTMIFDNAFNCT |
| | precursor | FEYISDAFSLDVSEKSGNFKHLREFVFKNKDGFLYVYKGYQPI |
| | (Genbank: | DVVRDLPSGFNTLKPIFKLPLGINITNFRAILTAFSP |
| | ACQ82725) | AQDIWGTSAAAYFVGYLKPTTFMLKYDENGTITDAVDCSQNPL |
| | | AELKCSVKSFEIDKGIYQTSNFRVVPSGDVVRFPNIT |
| | | NLCPFGEVFNATKFPSVYAWERKKISNCVADYSVLYNSTFFST |
| | | FKCYGVSATKLNDLCFSNVYADSFVVKGDDVRQIAPG |
| | | QTGVIADYNYKLPDDFMGCVLAWNTRNIDATSTGNYNYKYRY |
| | | LRHGKLRPFERDISNVPFSPDGKPCTPPALNCYWPLND |
| | | YGFYTTTGIGYQPYRVVVLSFELLNAPATVCGPKLSTDLIKNQC |
| | | VNFNFNGLTGTGVLTPSSKRFQPFQQFGRDVSDFTD |
| | | SVRDPKTSEILDISPCSFGGVSVITPGTNASSEVAVLYQGVNCT |
| | | DVSTAIHADQLTPAWRIYSTGNNVFQTQAGCLIGAE |
| | | HVDTSYECDIPVGAGICASYHTVSLLRSTSQKSIVAYTMSLGA |
| | | DSSIAYSNNTIAIPTNFSISITTEVMPVSMAKTSVDC |
| | | NMYICGDSTECANLLLQYGSFCTQLNRALSGIAAEQDRNTREV |
| | | FAQVKQMYKTPTLKYFGGFNFSQILPDPLKPTKRSFI |
| | | EDLLFNKVTLADAGFMKQYGECLGDINARDLICAQKFNGLTVL |
| | | PPLLTDDMIAAYTAALVSGTATAGWTFGAGAALQIPF |
| | | AMQMAYRFNGIGVTQNVLYENQKQIANQFNKAISQIQESLTTT |
| | | STALGKLQDVVNQNAQALNTLVKQLSSNFGAISSVLN |
| | | DILSRLDKVEAEVQIDRLITGRLQSLQTYVTQQLIRAAEIRASAN |
| | | LAATKMSECVLGQSKRVDFCGKGYHLMSFPQAAPH |
| | | GVVFLHVTYVPSQERNFTTAPAICHEGKAYFPREGVFVFNGTS |
| | | WFITQRNFFSPQIITTDNTFVSGNCDVVIGIINNTVY |
| | | DPLQPELDSFKEELDKYFKNHTSPDVDLGDISGINASVVNIQKE |
| | | IDRLNEVAKNLNESLIDLQELGKYEQYIKWPWYVWL |
| | | GFIAGLIAIVMVTILLCCMTSCCSCLKGACSCGSCCKFDEDDSE |
| | | PVLKGVKLHYT |
| 88 | SARS | MFIFLLFLTLTSGSDLDRCTTFDDVQAPNYTQHTSSMRGVYYP |
| | coronavirus AS | DEIFRSDTLYLTQDLFLPFYSNVTGFHTINHTFGNPV |
| | Spike protein S | IPFKDGIYFAATEKSNVVRGWVFGSTMNNKSQSVIIINNSTNVV |
| | (Genbank: | IRACNFELCDNPFFAVSKPMGTQTHTMIFDNAFNCT |
| | AAQ94060) | FEYISDAFSLDVSEKSGNFKHLREFVFKNKDGFLYVYKGYQPI |
| | | DVVRDLPSGFNTLKPIFKLPLGINITNFRAILTAFSP |
| | | AQDIWGTSAAAYFVGYLKPTTFMLKYDENGTITDAVDCSQNPL |
| | | AELKCSVKSFEIDKGIYQTSNFRVVPSGDVVRFPNIT |
| | | NLCPFGEVFNATKFPSVYAWERKKISNCVADYSVLYNSTFFST |
| | | FKCYGVSATKLNDLCFSNVYADSFVVKGDDVRQIAPG |
| | | QTGVIADYNYKLPDDFMGCVLAWNTRNIDATSTGNYNYKYRY |
| | | LRHGKLRPFERDISNVPFSPDGKPCTPPALNCYWPLND |
| | | YGFYTTTGIGYQPYRVVVLSFELLNAPATVCGPKLSTDLIKNQC |
| | | VNFNFNGLTGTGVLTPSSKRFQPFQQFGRDVSDFTD |
| | | SVRDPKTSEILDISPCSFGGVSVITPGTNASSEVAVLYQDVNCT |
| | | DVSTAIHADQLTPAWRIYSTGNNVFQTQAGCLIGAE |
| | | HVDTSYECDIPIGAGICASYHTVSLLRSTSQKSIVAYTMSLGAD |
| | | SSIAYSNNTIAIPTNFSISITTEVMPVSMAKTSVDC |
| | | NMYICGDSTECANLLLQYGSFCTQLNRALSGIAAEQDRNTREV |
| | | FAQVKQMYKTPTLKYFGGFNFSQILPDPLKPTKRSFI |
| | | EDLLFNKVTLADAGFMKQYGECLGDINARDLICAQKFNGLTVL |
| | | PPLLTDDMIAAYTAALVSGTATAGWTFGAGAALQIPF |
| | | AMQMAYRFNGIGVTQNVLYENQKQIANQFNKAISQIQESLTTT |
| | | STALGKLQDVVNQNAQALNTLVKQLSSNFGAISSVLN |
| | | DILSRLDKVEAEVQIDRLITGRLQSLQTYVTQQLIRAAEIRASAN |
| | | LAATKMSECVLGQSKRVDFCGKGYHLMSFPQAAPH |
| | | GVVFLHVTYVPSQERNFTTAPAICHEGKAYFPREGVFVFNGTS |
| | | WFITQRNFFSPQIITTDNTFVSGNCDVVIGIINNTVY |
| | | DPLQPELDSFKEELDKYFKNHTSPDVDLGDISGINASVVNIQKE |
| | | IDRLNEVAKNLNESLIDLQELGKYEQYIKWPWYVWL |
| | | GFIAGLIAIVMVTILLCCMTSCCSCLKGACSCGSCCKFDEDDSE |
| | | PVLKGVKLHYT |
| 89 | SARS | MFIFLLFLTLTSGSDLDRCTTFDDVQAPNYTQHTSSMRGVYYP |
| | coronavirus | DEIFRSDTLYLTQDLFLPFYSNVTGFHTINHTFGNPV |
| | ExoN1 | IPFKDGIYFAATEKSNVVRGWVFGSTMNNKSQSVIIINNSTNVV |
| | Spike | IRACNFELCDNPFFAVSKPMGTQTHTMIFDNAFNCT |
| | glycoprotein | FEYISDAFSLDVSEKSGNFKHLREFVFKNKDGFLYVYKGYQPI |
| | precursor | DVVRDLPSGFNTLKPIFKLPLGINITNFRAILTAFSP |
| | (Genbank: | AQDIWGTSAAAYFVGYLKPTTFMLKYDENGTITDAVDCSQNPL |
| | AFM43867) | AELKCSVKSFEIDKGIYQTSNFRVVPSGDVVRFPNIT |
| | | NLCPFGEVFNATKFPSVYAWERKKISNCVADYSVLYNSTFFST |
| | | FKCYGVSATKLNDLCFSNVYADSFVVKGDDVRQIAPG |
| | | QTGVIADYNYKLPDDFMGCVLAWNTRNIDATSTGNYNYKYRY |
| | | LRHGKLRPFERDISNVPFSPDGKPCTPPALNCYWPLND |
| | | YGFYTTTGIGYQPYRVVVLSFELLNAPATVCGPKLSTDLIKNQC |
| | | VNFNFNGLTGTGVLTPSSKRFQPFQQFGRDVSDFTD |
| | | SVRDPKTSEILDISPCSFGGVSVITPGTNASSEVAVLYQDVNCT |
| | | DVSTAIHADQLTPAWRIYSTGNNVFQTQAGCLIGAE |
| | | YVDTSYECDIPIGAGICASYHTVSLLRSTSQKSIVAYTMSLGAD |
| | | SSIAYSNNTIAIPTNFSISIATEVMPVSMAKTSVDC |
| | | NMYICGDSTECANLLLQYGSFCTQLNRALSGIAAEQDRNTREV |
| | | FAQVKQMYKTPTLKYFGGFNFSQILPDPLKPTKRSFI |
| | | EDLLFNKVTLADAGFMKQYGECLGDINARDLICAQKFNGLTVL |
| | | PPLLTDDMIAAYTAALVSGTATAGWTFGAGAALQIPF |
| | | AMQMAYRFNGIGVTQNVLYENQKQIANQFNKAISQIQESLTTT |
| | | STALGKLQDVVNQNAQALNTLVKQLSSNFGAISSVLN |
| | | DILSRLDKVEAEVQIDRLITGRLQSLQTYVTQQLIRAAEIRASAN |
| | | LAATKMSECVLGQSKRVDFCGKGYHLMSFPQAAPH |
| | | GVVFLHVTYVPSQERNFTTAPAICHEGKAYFPREGVFVFNGTS |
| | | WFITQRNFFSPQIITTDNTFVSGNCDVVIGIINNTVY |
| | | DPLQPELDSFKEELDKYFKNHTSPDVDLGDISGINASVVNIQKE |
| | | IDRLNEVAKNLNESLIDLQELGKYEQYIKWPWYVWL |
| | | GFIAGLIAIVMVTILLCCMTSCCSCLKGACSCGSCCKFDEDDSE |
| | | PVLKGVKLHYT |
| 90 | SARS | MFIFLLFLTLTSGSDLDRCTTFDDVQAPNYTQHTSSMRGVYYP |
| | coronavirus | DEIFRSDTLYLTQDLFLPFYSNVTGFHTINHTFGNPV |
| | ExoN1 | IPFKDGIYFAATEKSNVVRGWVFGSTMNNKSQSVIIINNSTNVV |
| | Spike | IRACNFELCDNPFFAVSKPMGTQTHTMIFDNAFNCT |
| | glycoprotein | FEYISDAFSLDVSEKSGNFKHLREFVFKNKDGFLYVYKGYQPI |
| | (Genbank: | DVVRDLPSGFNTLKPIFKLPLGINITNFRAILTAFSP |
| | AGT21078) | AQDIWGTSAAAYFVGYLKPTTFMLKYDENGTITDAVDCSQNPL |
| | | AELKCSVKSFEIDKGIYQTSNFRVVPSGDVVRFPNIT |
| | | NLCPFGEVFNATKFPSVYAWERKKISNCVADYSVLYNSTFFST |
| | | FKCYGVSATKLNDLCFSNVYADSFVVKGDDVRQIAPG |
| | | QTGVIADYNYKLPDDFMGCVLAWNTRNIDATSTGNYNYKYRS |
| | | LRHGKLRPFERDISNVPFSPDGKPCTPPALNCYWPLND |
| | | YGFYTTTGIGYQPYRVVVLSFELLNAPATVCGPKLSTDLIKNQC |
| | | VNFNFNGLTGTGVLTPSSKRFQPFQQFGRDVSDFTD |
| | | SVRDPKTSEILDISPCSFGGVSVITPGTNASSEVAVLYQDVNCT |
| | | DVSTAIHADQLTPAWRIYSTGNNVFQTQAGCLIGAE |
| | | YVDTSYECDIPIGAGICASYHTVSLLRSTSQKSIVAYTMSLGAD |
| | | SSIAYSNNTIAIPTNFSISIATEVMPVSMAKTSVDC |
| | | NMYICGDSTECANLLLQYGSFCTQLNRALSGIAAEQDRNTREV |
| | | FAQVKQMYKTPTLKYFGGFNFSQILPDPLKPTKRSFI |
| | | EDLLFNKVTLADAGFMKQYGECLGDINARDLICAQKFNGLTVL |
| | | PPLLTDDMIAAYTAALVSGTVTAGWTFGAGAALQIPF |
| | | AMQMAYRFNGIGVTQNVLYENQKQIANQFNKAISQIQESLTTT |
| | | STALGKLQDVVNQNAQALNTLVKQLSSNFGAISSVLN |
| | | DILSRLDKVEAEVQIDRLITGRLQSLQTYVTQQLIRAAEIRASAN |
| | | LAATKMSECVLGQSKRVDFCGKGYHLMSFPQAAPH |
| | | GVVFLHVTYVPSQERNFTTAPAICHEGKAYFPREGVFVFNGTS |
| | | WFITQRNFFSPQIITTDNTFVSGNCDVVIGIINNTVY |
| | | DPLQPELDSFKEELDKYFKNHTSPDVDLGDISGINASVVNIQKE |
| | | IDRLNEVAKNLNESLIDLQELGKYEQYIKWPWYVWL |
| | | GFIAGLIAIVMVTILLCCMTSCCSCLKGACSCGSCCKFDEDDSE |
| | | PVLKGVKLHYT |
| 91 | SARS | MFIFLLFLTLTSGSDLDRCTTFDDVQAPNYTQHTSSMRGVYYP |
| | coronavirus | DEIFRSDTLYLTQDLFLPFYSNVTGFHTINHTFGNPV |
| | Frankfurt 1 | IPFKDGIYFAATEKSNVVRGWVFGSTMNNKSQSVIIINNSTNVV |
| | Spike protein S | IRACNFELCDNPFFAVSKPMGTQTHTMIFDNAFNCT |
| | (Genbank: | FEYISDAFSLDVSEKSGNFKHLREFVFKNKDGFLYVYKGYQPI |
| | AAP33697) | DVVRDLPSGFNTLKPIFKLPLGINITNFRAILTAFSP |
| | | AQDIWGTSAAAYFVGYLKPTTFMLKYDENGTITDAVDCSQNPL |
| | | AELKCSVKSFEIDKGIYQTSNFRVVPSGDVVRFPNIT |
| | | NLCPFGEVFNATKFPSVYAWERKKISNCVADYSVLYNSTFFST |
| | | FKCYGVSATKLNDLCFSNVYADSFVVKGDDVRQIAPG |
| | | QTGVIADYNYKLPDDFMGCVLAWNTRNIDATSTGNYNYKYRY |
| | | LRHGKLRPFERDISNVPFSPDGKPCTPPALNCYWPLND |
| | | YGFYTTTGIGYQPYRVVVLSFELLNAPATVCGPKLSTDLIKNQC |
| | | VNFNFNGLTGTGVLTPSSKRFQPFQQFGRDVSDFTD |
| | | SVRDPKTSEILDISPCSFGGVSVITPGTNASSEVAVLYQDVNCT |
| | | DVSTAIHADQLTPAWRIYSTGNNVFQTQAGCLIGAE |
| | | HVDTSYECDIPIGAGICASYHTVSLLRSTSQKSIVAYTMSLGAD |
| | | SSIAYSNNTIAIPTNFSISITTEVMPVSMAKTSVDC |
| | | NMYICGDSTECANLLLQYGSFCTQLNRALSGIAAEQDRNTREV |
| | | FAQVKQMYKTPTLKYFGGFNFSQILPDPLKPTKRSFI |
| | | EDLLFNKVTLADAGFMKQYGECLGDINARDLICAQKFNGLTVL |
| | | PPLLTDDMIAAYTAALVSGTATAGWTFGAGAALQIPF |
| | | AMQMAYRFNGIGVTQNVLYENQKQIANQFNKAISQIQESLTTT |
| | | STALGKLQDVVNQNAQALNTLVKQLSSNFGAISSVLN |
| | | DILSRLDKVEAEVQIDRLITGRLQSLQTYVTQQLIRAAEIRASAN |
| | | LAATKMSECVLGQSKRVDFCGKGYHLMSFPQAAPH |
| | | GVVFLHVTYVPSQERNFTTAPAICHEGKAYFPREGVFVFNGTS |
| | | WFITQRNFFSPQIITTDNTFVSGNCDVVIGIINNTVY |
| | | DPLQPELDSFKEELDKYFKNHTSPDVDFGDISGINASVVNIQKE |
| | | IDRLNEVAKNLNESLIDLQELGKYEQYIKWPWYVWL |
| | | GFIAGLIAIVMVTILLCCMTSCCSCLKGACSCGSCCKFDEDDSE |
| | | PVLKGVKLHYT |
| 92 | SARS | MFIFLLFLTLTSGSDLDRCTTFDDVQAPNYTQHTSSMRGVYYP |
| | coronavirus | DEIFRSDTLYLTQDLFLPFYSNVTGFHTINHTFGNPV |
| | Frankfurt1-v01 | IPFKDGIYFAATEKSNVVRGWVFGSTMNNKSQSVIIINNSTNVV |
| | Spike | IRACNFELCDNPFFAVSKPMGTQTHTMIFDNAFNCT |
| | glycoprotein | FEYISDAFSLDVSEKSGNFKHLREFVFKNKDGFLYVYKGYQPI |
| | (Genbank: | DVVRDLPSGFNTLKPIFKLPLGINITNFRAILTAFSP |
| | BAF42873) | AQDIWGTSAAAYFVGYLKPTTFMLKYDENGTITDAVDCSQNPL |
| | | AELKCSVKSFEIDKGIYQTSNFRVVPSGDVVRFPNIT |
| | | NLCPFGEVFNATKFPSVYAWERKKISNCVADYSVLYNSTFFST |
| | | FKCYGVSATKLNDLCFSNVYADSFVVKGDDVRQIAPG |
| | | QTGVIADYNYKLPDDFMGCVLAWNTRNIDATSTGNYNYKYRY |
| | | LRHGKLRPFERDISNVPFSPDGKPCTPPALNCYWPLND |
| | | YGFYTTTGIGYQPYRVVVLSFELLNAPATVCGPKLSTDLIKNQC |
| | | VNFNFNGLTGTGVLTPSSKRFQPFQQFGRDVSDFTD |
| | | SVRDPKTSEILDISPCSFGGVSVITPGTNASSEVAVLYQDVNCT |
| | | DVSTAIHADQLTPAWRIYSTGNNVFQTQAGCLIGAE |
| | | YVDTSYECDIPIGAGICASYHTVSLLRSTSQKSIVAYTMSLGAD |
| | | SSIAYSNNTIAIPTNFSISITTEVMPVSMAKTSVDC |
| | | NMYICGDSTECANLLLQYGSFCTQLNRALSGIAAEQDRNTREV |
| | | FAQVKQMYKTPTLKYFGGFNFSQILPDPLKPTKRSFI |
| | | EDLLFNKVTLSDAGFMKQYGECLGDINARDLICAQKFNGLTVL |
| | | PPLLTDDMIAAYTAALVSGTATAGWTFGAGAALQIPF |
| | | AMQMAYRFNGIGVTQNVLYENQKQIANQFNKAISQIQESLTTT |
| | | STALGKLQDVVNQNAQALNTLVKQLSFNFGAISSVLN |
| | | DILSRLDKVEAEVQIDRLITGRLQSLQTYVTQQLIRAAEIRASAN |
| | | LAATKMSECVLGQSKRVDFCGKGYHLMSFPQAAPH |
| | | GVVFLHVTYVPSQERNFTTAPAICHEGKAYFPREGVFVFNGTS |
| | | WFITQRNFFSPQIITTDNTFVSGNCDVVIGIINNTVY |
| | | DPLQPELDSFKEELDKYFKNHTSPDVDFGDISGINASVVNIQKE |
| | | IDRLNEVAKNLNESLIDLQELGKYEQYIKWPWYVWL |
| | | GFIAGLIAIVMVTILLCCMTSCCSCLKGACSCGSCCKFDEDDSE |
| | | PVLKGVKLHYT |
| 93 | SARS | MFIFLLFLTLTSGSDLDRCTTFDDVQAPNYTQHTSSMRGVYYP |
| | coronavirus | DEIFRSDTLYLTQDLFLPFYSNVTGFHTINHTFGNPV |
| | Frankfurt 1 | IPFKDGIYFAATEKSNVVRGWVFGSTMNNKSQSVIIINNSTNVV |
| | Spike protein | IRACNFELCDNPFFAVSKPMGTQTHTMIFDNAFNCT |
| | (Genbank: | FEYISDAFSLDVSEKSGNFKHLREFVFKNKDGFLYVYKGYQPI |
| | BAE93401) | DVVRDLPSGFNTLKPIFKLPLGINITNFRAILTAFSP |
| | | AQDIWGTSAAAYFVGYLKPTTFMLKYDENGTITDAVDCSQNPL |
| | | AELKCSVKSFEIDKGIYQTSNFRVVPSGDVVRFPNIT |
| | | NLCPFGEVFNATKFPSVYAWERKKISNCVADYSVLYNSTFFST |
| | | FKCYGVSATKLNDLCFSNVYADSFVVKGDDVRQIAPG |
| | | QTGVIADYNYKLPDDFMGCVLAWNTRNIDATSTGNYNYKYRC |
| | | LRHGKLRPFERDISNVPFSPDGKPCTPPAFNCYWPLND |
| | | YGFYTTTGIGYQPYRVVVLSFELLNAPATVCGPKLSTDLIKNQC |
| | | VNFNFNGLTGTGVLTPSSKRFQPFQQFGRDVSDFTD |
| | | SVRDPKTSEILDISPCSFGGVSVITPGTNASSEFAVLYQDVNCT |
| | | DVSTAIHADQLTPAWRIYSTGNNVFQTQAGCLIGAE |
| | | YVDTSYECDIPIGAGICASYHTVSLLRSTSQKSIVAYTMSLGAD |
| | | SSIAYSNNTIAIPTNFSISITTEVMPVSMAKTSVDC |
| | | NMYICGDSTECANLLLQYGSFCTQLNRALSGIAAEQDRNTREV |
| | | FAQVKQMYKTPTLKYFGGFNFSQILPDPLKSTKRSFI |
| | | EDLLFNKVTLADAGFMKQYGECLGDINARDLICAQKFNGLTVL |
| | | PPLLTDDMIAAYTAALVSGTATAGWTFGAGAALQIPF |
| | | AMQMAYRFNGIGVTQNVLYENQKQIANQFNKAISQIQESLTTT |
| | | STALGKLQDVVNQNAQALNTLVKQLSSNFGAISSVLN |
| | | DILSRLDKVEAEVQIDRLITGRLQSLQTYVTQQLIRAAEIRASAN |
| | | LAATKMSECVLGQSKRVDFCGKGYHLMSFPQAAPH |
| | | GVVFLHVTYVPSQERNFTTAPAICHEGKAYFPREGVFVFNGTS |
| | | WFITQRNFFSPQIITTDNTFVSGNCDVVIGIINNTVY |
| | | DPLQPELDSFKEELDKYFKNHTSPDVDFGDISGINASVVNIQKE |
| | | IDRLNEVAKNLNESLIDLQELGKYEQYIKWPWYVWL |
| | | GFIAGLIAIVMVTILLCCMTSCCSCLKGACSCGSCCKFDEDDSE |
| | | PVLKGVKLHYT |
| 94 | SARS-related | MFIFLLFLTLTSGSDLDRCTTFDDVQAPNYTQHTSSMRGVYYP |
| | coronavirus | DEIFRSDTLYLTQDLFLPFYSNVTGFHTINHTFGNPV |
| | Spike | IPFKDGIYFAATEKSNVVRGWVFGSTMNNKSQSVIIINNSTNVV |
| | glycoprotein | IRACNFELCDNPFFAVSKPMGTQTHTMIFDNAFNCT |
| | (Genbank: | FEYISDAFSLDVSEKSGNFKHLREFVFKNKDGFLYVYKGYQPI |
| | ABD72969) | DVVRDLPSGFNTLKPIFKLPLGINITNFRAILTAFSP |
| | | AQDIWGTSAAAYFVGYLKPTTFMLKYDENGTITDAVDCSQNPL |
| | | AELKCSVKSFEIDKGIYQTSNFRVVPSGDVVRFPNIT |
| | | NLCPFGEVFNATKFPSVYAWERKKISNCVADYSVLYNSTFFST |
| | | FKCYGVSATKLNDLCFSNVYVDSFVVKGDDVRQIAPG |
| | | QTGVIADYNYKLPDDFMGCVLAWNTRNIDATSTGNYNYKYRY |
| | | LRHGKLRPFERDISNVPFSPDGKPCTPPALNCYWPLND |
| | | YGFYTTTGIGYQPYRVVVLSFELLNAPATVCGPKLSTDLIKNQC |
| | | VNFNFNGLTGTGVLTPSSKRFQPFQQFGRDVSDFTD |
| | | SVRDPKTSEILDISPCSFGGVSVITPGTNASSEVAVLYQDVNCT |
| | | DVSTAIHADQLTPAWRIYSTGNNVFQTQAGCLIGAE |
| | | HVDTSYECDIPIGAGICASYHTVSLLRSTSQKSIVAYTMSLGAD |
| | | SSIAYSNNTIAIPTNFSISITTEVMPVSMAKTSVDC |
| | | NMYICGDSTECANLLLQYGSFCTQLNRALSGIAAEQDRNTREV |
| | | FAQVKQMYKTPTLKYFGGFNFSQILPDPLKPTKRSFI |
| | | EDLLFNKVTLADAGFMKQYGECLGDINARDLICAQKFNGLTVL |
| | | PPLLTDDMIAAYTAALVSGTATAGWTFGAGAALQIPF |
| | | AMQMAYRFNGIGVTQNVLYENQKQIANQFNKAISQIQESLTTT |
| | | STALGKLQDVVNQNAQALNTLVKQLSSNFGAISSVLN |
| | | DILSRLDKVEAEVQIDRLITGRLQSLQTYVTQQLIRAAEIRASAN |
| | | LAATKMSECVLGQSKRVDFCGKGYHLMSFPQAAPH |
| | | GVVFLHVTYVPSQERNFTTAPAICHEGKAYFPREGVFVFNGTS |
| | | WFITQRNFFSPQIITTDNTFVSGNCDVVIGIINNTVY |
| | | DPLQPELDSFKEELDKYFKNHTSPDVDLGDISGINASVVNIQKE |
| | | IDRLNEVAKNLNESLIDLQELGKYEQYIKWPWYVWL |
| | | GFIAGLIAIVMVTILLCCMTSCCSCLKGACSCGSCCKFDEDDSE |
| | | PVLKGVKLHYT |
| 95 | SARS | MFIFLLFLTLTSGSDLDRCTTFDDVQAPNYTQHTSSMRGVYYP |
| | coronavirus | DEIFRSDTLYLTQDLFLPFYSNVTGFHTINHTFGNPV |
| | BJ182-12 | IPFKDGIYFAATEKSNVVRGWVFGSTMNNKSQSVIIINNSTNVV |
| | Spike | IRACNFELCDNPFFAVSKPMGTQTHTMIFDNAFNCT |
| | glycoprotein S | FEYISDAFSLDVSEKSGNFKHLREFVFKNKDGFLYVYKGYQPI |
| | (Genbank: | DVVRDLPSGFNTLKPIFKLPLGINITNFRAILTAFSP |
| | ACB69905) | AQDIWGTSAAAYFVGYLKPTTFMLKYDENGTITDAVDCSQNPL |
| | | AELKCSVKSFEIDKGIYQTSNFRVVPSGDVVRFPNIT |
| | | NLCPFGEVFNATKFPSVYAWERKKISNCVADYSVLYNSTFFST |
| | | FKCYGVSATKLNDLCFSNVYADSFVVKGDDVRQIAPG |
| | | QTGVIADYNYKLPDDFMGCVLAWNTRNIDATSTGNYNYKYRY |
| | | LRHGKLRPFERDISNVPFSPDGKPCTPPALNCYWPLND |
| | | YGFYTTTGIGYQPYRVVVLSFELLNAPATVCGPKLSTDLIKNQC |
| | | VNFNFNGLTGTGVLTPSSKRFQPFQQFGRDVSDFTD |
| | | SVRDPKTSEILDISPCSFGGVSVITPGTNASSEVAVLYQDVNCT |
| | | DVSTAIHADQLTPAWRIYSTGNNVFQTQAGCLIGAE |
| | | HVDTSYECDIPIGAGICASYHTVSLLRSTSQKSIVAYTMSLGAD |
| | | SSIAYSNNTIAIPTNFSISITTEVMPVSMAKTSVDC |
| | | NMYICGDSTECANLLLQYGSFCTQLNRALSGIAAEQDRNTREV |
| | | FAQVKQMYKTPTLKYFDGFNFSQILPDPLKPIKRSFI |
| | | EDLLFNKVTLADAGFMKQYGECLGDINARDLICAQKFNGLTVL |
| | | PPLLTDDMIAAYTAALVSGTATAGWTFGAGAALQIPF |
| | | AMQMAYRFNGIGVTQNVLYENQKQIANQFNKAISQIQESLTTT |
| | | STALGKLQDVVNQNAQALNTLVKQLSSNFGAISSVLN |
| | | DILSRLDKVEAEVQIDRLITGRLQSLQTYVTQQLIRAAEIRASAN |
| | | LAATKMSECVLGQSKRVDFCGKGYHLMSFPQAAPH |
| | | GVVFLHVTYVPSQERNFTTAPAICHEGKAYFPREGVFVFNGTS |
| | | WFITQRNFFSPQIITTDNTFVSGNCDVVIGIINNTVY |
| | | DPLQPELDSFKEELDKYFKNHTSPDVDLGDISGINAPVVNIQKE |
| | | IDRLNEVAKNLNESLIDLRELGKYEQYIKWPWYVWL |
| | | GFIAGLIAIVMVTILLCCMTSCCSCLKGACSCGSCCKFDEDDSE |
| | | PVLKGVKLHYT |
| 96 | SARS | MFIFLLFLTLTSGSDLDRCTTFDDVQAPNYTQHTSSMRGVYYP |
| | coronavirus | DEIFRSDTLYLTQDLFLPFYSNVTGFHTINHTFGNPI |
| | BJ182a | IPFKDGIYFAATEKSNVVRGWVFGSTMNNKSQSVIIINNSTNVV |
| | Spike | IRACNFELCDNPFFAVSKPMGTQTHTMIFDNAFNCT |
| | glycoprotein S | FEYISDAFSLDVSEKSGNFKHLREFVFKNKDGFLYVYKGYQPI |
| | (Genbank: | DVVRDLPSGFNTLKPIFKLPLGINITNFRAILTAFSP |
| | ACB69860) | AQDIWGTSAAAYFVGYLKPTTFMLKYDENGTITDAVDCSQNPL |
| | | AELKCSVKSFEIDKGIYQTSNFRVVPSGDVVRFPNIT |
| | | NLCPFGEVFNATKFPSVYAWERKKISNCVADYSVLYNSTFFST |
| | | FKCYGVSATKLNDLCFSNVYADSFVVKGDDVRQIAPG |
| | | QTGVIADYNYKLPDDFMGCVLAWNTRNIDATSTGNYNYKYRY |
| | | LRHGKLRPFERDISNVPFSPDGKPCTPPALNCYWPLND |
| | | YGFYTTTGIGYQPYRVVVLSFELLNAPATVCGPKLSTDLIKNQC |
| | | VNFNFNGLTGTGVLTPSSKRFQPFQQFGRDVSDFTD |
| | | SVRDPKTSEILDISPCSFGGVSVITPGTNASSEVAVLYQDVNCT |
| | | DVSTAIHADQLTPAWRIYSTGNNVFQTQAGCLIGAE |
| | | HVDTSYECDIPIGAGICASYHTVSLLRSTSQKSIVAYTMSLGAD |
| | | SSIAYSNNTIAIPTNFSISITTEVMPVSMAKTSVDC |
| | | NMYICGDSTECANLLLQYGSFCTQLNRALSGIAAEQDRNTREV |
| | | FAQVKQMYKTPTLKYFDGFNFSQILPDPLKPTKRSFI |
| | | EDLLFNKVTLADAGFMKQYGECLGDINARDLICAQKFNGLTVL |
| | | PPLLTDDMIAAYTAALVSGTATAGWAFGAGAALQIPF |
| | | AMQMAYRFNGIGVTQNVLYENQKQIANQFNKAISQIQESLTTT |
| | | STALGKLQDVVNQNAQALNTLVKQLSSNFGAISSVLN |
| | | DILSRLDKVEAEVQIDRLITGRLQSLQTYVTQQLIRAAEIRASAN |
| | | LAATKMSECVLGQSKRVDFCGKGYHLMSFPQAAPH |
| | | GVVFLHVTYVPSQERNFTTAPAICHEGKAYFPREGVFVFNGTS |
| | | WFITQRNFFSPQIITTDNTFVSGNCDVVIGIINNTVY |
| | | DPLQPELDSFKEELDKYFKNHTSPDVDLGDISGINASVVNIQKE |
| | | IDRLNEVAKNLNESLIDLRELGKYEQYIKWPWYVWL |
| | | GFIAGLIAIVMVTILLCCMTSCCSCLKGACSCGSCCKFDEDDSE |
| | | PVLKGVKLHYT |
| 97 | SARS | MFIFLLFLTLTSGSDLDRCTTFDDVQAPNYTQHTSSMRGVYYP |
| | coronavirus | DEIFRSDTLYLTQDLFLPFYSNVTGFHTINHTFGNPV |
| | BJ182-8 | IPFKDGIYFAATEKSNVVRGWVFGSTMNNKSQSVIIINNSTNVV |
| | Spike | IRACNFELCDNPFFAVSKPMGTQTHTMIFDNAFNCT |
| | glycoprotein S | FEYISDAFSLDVSEKSGNFKHLREFVFKNKDGFLYVYKGYQPI |
| | (Genbank: | DVVRDLPSGFNTLKPIFKLPLGINITNFRAILTAFSP |
| | ACB69894) | AQDIWGTSAAAYFVGYLKPTTFMLKYDENGTITDAVDCSQNPL |
| | | AELKCSVKSFEIDKGIYQTSNFRVVPSGDVVRFPNIT |
| | | NLCPFGEVFNATKFPSVYAWERKKISNCVADYSVLYNSTFFST |
| | | FKCYGVSATKLNDLCFSNVYADSFVVKGDDVRQIAPG |
| | | QTGVIADYNYKLPDDFMGCVLAWNTRNIDATSTGNYNYKYRY |
| | | LRHGKLRPFERDISNVPFSPDGKPCTPPALNCYWPLND |
| | | YGFYTTTGIGYQPYRVVVLSFELLNAPATVCGPKLSTDLIKNQC |
| | | VNFNFNGLTGTGVLTPSSKRFQPFQQFGRDVSDFTD |
| | | SVRDPKTSEILDISPCSFGGVSVITPGTNASSEVAVLYQDVNCT |
| | | DVSTAIHADQLTPAWRIYSTGNNVFQTQAGCLIGAE |
| | | HVDTSYECDIPIGAGICASYHTVSLLRSTSQKSIVAYTMSLGAD |
| | | SSIAYSNNTIAIPTNFSISITTEVMPVSMAKTSVDC |
| | | NMYICGDSTECANLLLQYGSFCTQLNRALSGIAAEQDRNTREV |
| | | FAQVKQMYKTPTLKYFDGFNFSQILPDPLKPTKRSFI |
| | | EDLLFNKVTLADAGFMKQYGECLGDINARDLICAQKFNGLTVL |
| | | PPLLTDDMIAAYTAALVSGTATAGWTFGAGAALQIPF |
| | | AMQMAYRFNGIGVTQNVLYENQKQIANQFNKAISQIQESLTTT |
| | | STALGKLQDVVNQNAQALNTLVKQLSSNFGAISSVLN |
| | | DILSRLDKVEAEVQIDRLITGRLQSLQTYVTQQLIRAAEIRASAN |
| | | LAATKMSECVLGQSKRVDFCGKGYHLMSFPQAAPH |
| | | GVVFLHVTYVPSQERNFTTAPAICHEGKAYFPREGVFVFNGTS |
| | | WFITQRNFFSPQIITTDNTFVSGNCDVVIGIINNTVY |
| | | DPLQPELDSFKEELDKYFKNHTSPDVDLGDISGINASVVNIQKE |
| | | IDRLNEVAKNLNESLIDLRELGKYEQYIKWPWYVWL |
| | | GFIAGLIAIVMVTILLCCMTSCCSCLKGACSCGSCCKFDEDDSE |
| | | PVLKGVKLHYT |
| 98 | SARS | MFIFLLFLTLTSGSDLDRCTTFDDVQAPNYTQHTSSMRGVYYP |
| | coronavirus | DEIFRSDTLYLTQDLFLPFYSNVTGFHTINHTLGNPV |
| | BJ182-4 | IPFKDGIYFAATEKSNVVRGWVFGSTMNNKSQSVIIINNSTNVV |
| | Spike | IRACNFELCDNPFFAVSKPMGTQTHTMIFDNAFNCT |
| | glycoprotein S | FEYISDAFSLDVSEKSGNFKHLREFVFKNKDGFLYVYKGYQPI |
| | (Genbank: | DVVRDLPSGFNTLKPIFKLPLGINITNFRAILTAFSP |
| | ACB69883) | AQDIWGTSAAAYFVGYLKPTTFMLKYDENGTITDAVDCSQNPL |
| | | AELKCSVKSFEIDKGIYQTSNFRVVPSGDVVRFPNIT |
| | | NLCPFGEVFNATKFPSVYAWERKKISNCVADYSVLYNSTFFST |
| | | FKCYGVSATKLNDLCFSNVYADSFVVKGDDVRQIAPG |
| | | QTGVIADYNYKLPDDFMGCVLAWNTRNIDATSTGNYNYKYRY |
| | | LRHGKLRPFERDISNVPFSPDGKPCTPPALNCYWPLND |
| | | YGFYTTTGIGYQPYRVVVLSFELLNAPATVCGPKLSTDLIKNQC |
| | | VNFNFNGLTGTGVLTPSSKRFQPFQQFGRDVSDFTD |
| | | SVRDPKTSEILDISPCSFGGVSVITPGTNASSEVAVLYQDVNCT |
| | | DVSTAIHADQLTPAWRIYSTGNNVFQTQAGCLIGAE |
| | | HVDTSYECDIPIGAGICASYHTVSLLRSTSQKSIVAYTMSLGAD |
| | | SSIAYSNNTIAIPTNFSISITTEVMPVSMAKTSVDC |
| | | NMYICGDSTECANLLLQYGSFCTQLNRALSGIAAEQDRNTREV |
| | | FAQVKQMYKTPTLKYFDGFNFSQILPDPLKPTKRSFI |
| | | EDLLFNKVTLADAGFMKQYGECLGDINARDLICAQKFNGLTVL |
| | | PPLLTDDMIAAYTAALVSGTATAGWTFGAGAALQIPF |
| | | AMQMAYRFNGIGVTQNVLYENQKQIANQFNKAISQIQESLTTT |
| | | STALGKLQDVVNQNAQALNTLVKQLSSNFGAISSVLN |
| | | DILSRLDKVEAEVQIDRLITGRLQSLQTYVTQQLIRAAEIRASAN |
| | | LAATKMSECVLGQSKRVDFCGKGYHLMSFPQAAPH |
| | | GVVFLHVTYVPSQERNFTTAPAICHEGKAYFPREGVFVFNGTS |
| | | WFITQRNFFSPQIITTDNTFVSGNCDVVIGIINNTVY |
| | | DPLQPELDSFKEELDKYFKNHTSPDVDLGDISGINASVVNIQKE |
| | | IDRLNEVAKNLNESLIDLRELGKYEQYIKWPWYVWL |
| | | GFIAGLIAIVMVTILLCCMTSCCSCLKGACSCGSCCKFDEDDSE |
| | | PVLKGVKLHYT |
| 99 | SARS | MFIFLLFLTLTSGSDLDRCTTFDDVQAPNYTQHTSSMRGVYYP |
| | coronavirus | DEIFRSDTLYLTQDLFLPFYSNVTGFHTINHTFGNPV |
| | Sino1-11 | IPFKDGIYFAATEKSNVVRGWVFGSTMNNKSQSVIIINNSTNVV |
| | Spike protein | IRACNFELCDNPFFAVSKPMGTQTHTMIFDNAFNCT |
| | (Genbank: | FEYISDAFSLDVSEKSGNFKHLREFVFKNKDGFLYVYKGYQPI |
| | AAR23250) | DVVRDLPSGFNTLKPIFKLPLGINITNFRAILTAFSP |
| | | AQDIWGTSAAAYFVGYLKPTTFMLKYDENGTITDAVDCSQNPL |
| | | AELKCSVKSFEIDKGIYQTSNFRVVPSGDVVRFPNIT |
| | | NLCPFGEVFNATKFPSVYAWERKKISNCVADYSVLYNSTFFST |
| | | FKCYGVSATKLNDLCFSNVYADSFVVKGDDVRQIAPG |
| | | QTGVIADYNYKLPDDFMGCVLAWNTRNIDATSTGNYNYKYRS |
| | | LRHGKLRPFERDISNVPFSPDGKPCTPPALNCYWPLND |
| | | YGFYTTTGIGYQPYRVVVLSFELLNAPATVCGPKLSTDLIKNQC |
| | | VNFNFNGLTGTGVLTPSSKRFQPFQQFGRDVSDFTD |
| | | SVRDPKTSEILDISPCSFGGVSVITPGTNASSEVAVLYQDVNCT |
| | | DVSTAIHADQLTPAWRIYSTGNNVFQTQAGCLIGAE |
| | | HVDTSYECDIPIGAGICASYHTVSLLRSTSQKSIVAYTMSLGAD |
| | | SSIAYSNNTIAIPTNFSISITTEVMPVSMAKTSVDC |
| | | NMYICGDSTECANLLLQYGSFCTQLNRALSGIAAEQDRNTREV |
| | | FAQVKQMYKTPTLKYFGGFNFSQILPDPLKPTKRSFI |
| | | EDLLFNKVTLADAGFMKQYGECLGDINARDLICAQKFNGLTVL |
| | | PPLLTDDMIAAYTAALVSGTATAGWTFGAGAALQIPF |
| | | AMQMAYRFNGIGVTQNVLYENQKQIANQFNKAISQIQESLTTT |
| | | STALGKLQDVVNQNAQALNTLVKQLSSNFGAISSVLN |
| | | DILSRLDKVEAEVQIDRLITGRLQSLQTYVTQQLIRAAEIRASAN |
| | | LAATKMSECVLGQSKRVDFCGKGYHLMSFPQAAPH |
| | | GVVFLHVTYVPSQERNFTTAPAICHEGKAYFPREGVFVFNGTS |
| | | WFITQRNFFSPQIITTDNTFVSGNCDVVIGIINNTVY |
| | | DPLQPELDSFKEELDKYFKNHTSPDVDLGDISGINASVVNIQKE |
| | | IDRLNEVAKNLNESLIDLQELGKYEQYIKWPWYVWL |
| | | GFIAGLIAIVMVTILLCCMTSCCSCLKGACSCGSCCKFDEDDSE |
| | | PVLKGVKLHYT |
| 100 | SARS | MFIFLLFLTLTSGSDLDRCTTFDDVQAPNYTQHTSSMRGVYYP |
| | coronavirus | DEIFRSDTLYLTQDLFLPFYSNVTGFHTINHTFGNPV |
| | ExoN1 | IPFKDGIYFAATEKSNVVRGWVFGSTMNNKSQSVIIINNSTNVV |
| | Spike | IRACNFELCDNPFFAVSKPMGTQTHTMIFDNAFNCT |
| | glycoprotein | FEYISDAFSLDVSEKSGNFKHLREFVFKNKDGFLYVYKGYQPI |
| | precursor | DVVRDLPSGFNTLKPIFKLPLGINITNFRAILTAFSP |
| | (Genbank: | AQDIWGTSAAAYFVGYLKPTTFMLKYDENGTITDAVDCSQNPL |
| | ACZ71797) | AELKCSVKSFEIDKGIYQTSNFRVVPSVDVVRFPNIT |
| | | NLCPFGEVFNATKFPSVYAWERKKISNCVADYSVLYNSTFFST |
| | | FKCYGVSATKLNDLCFSNVYADSFVVKGDDVRQIAPG |
| | | QTGVIADYNYKLPDDFMGCVLAWNTRNIDATSTGNYNYKYRY |
| | | LRHGKLRPFERDISNVPFSPDGKPCTPPALNCYWPLND |
| | | YGFYTTTGIGYQPYRVVVLSFELLNAPATVCGPKLSTDLIKNQC |
| | | VNFNFNGLTGTGVLTPSSKRFQPFQQFGRDVSDFTD |
| | | SVRDPKTSEILDISPCSFGGVSVITPGTNASSEVAVLYQDVNCT |
| | | DVSTAIHADQLTPAWRIYSTGNNAFQTQAGCLIGAE |
| | | HVDTSYECDIPIGAGICASYHTVSLLRSTSQKSIVAYTMSLGAD |
| | | SSIAYSNNTIAIPTNFSISITTEVMPVSMTKTSVDC |
| | | NMYICGDSTECANLLLQYGSFCTQLNRALSGIAAEQDRNTREV |
| | | FAQVKQMYKTPTLKYFGGFNFSQILPDPLKPTKRSFI |
| | | EDLLFNKVTLADAGFMKQYGECLGDINARDLICAQKFNGLTVL |
| | | PPLLTDDMIAAYTAALVSGTATAGWTFGAGAALQIPF |
| | | AMQMAYRFNGIGVTQNVLYENQKQIANQFNKAISQIQESLTTT |
| | | STALGKLQDVVNQNAQALNTLVKQLSSNFGAISSVLN |
| | | DILSRLDKVEAEVQIDRLITGRLQSLQTYVTQQLIRAAEIRASAN |
| | | LAATKMSECVLGQSKRVDFCGKGYHLMSFPQAAPH |
| | | GVVFLHVTYVPSQERNFTTAPAICHEGKAYFPREGVFVFNGTS |
| | | WFITQRNFFSPQIITTDNTFVSGNCDVVIGIINNTVY |
| | | DPLQPELDSFKEELDKYFKNHTSPDVDLGDISGINTSVVNIQKE |
| | | IDRLNEVAKNLNESLIDLQELGKYEQYIKWPWYVWL |
| | | GFIAGLIAIVMVTILLCCMTSCCSCLKGACSCGSCCKFDEDDSE |
| | | PVLKGVKLHYT |
| 101 | SARS | MFIFLLFLTLTSGSDLDRCTTFDDVQAPNYTQHTSSMRGVYYP |
| | coronavirus | DEIFRSDTLYLTQDLFLPFYSNVTGFHTINHTFGNPV |
| | ExoN1 | IPFKDGIYFAATEKSNVVRGWVFGSTMNNKSQSVIIINNSTNVV |
| | Spike | IRACNFELCDNPFFAVSKPMGTQTHTMIFDNAFNCT |
| | glycoprotein | FEYISDAFSLDVSEKSGNFKHLREFVFKNKDGFLYVYKGYQPI |
| | precursor | DVVRDLPSGFNTLKPIFKLPLGINITNFRAILTAFPP |
| | (Genbank: | AQDIWGTSAAAYFVGYLKPTTFMLKYDENGTITDAVDCSQNPL |
| | ACZ72020) | AELKCSVKSFEIDKGIYQTSNFRVVPSGDVVRFPNIT |
| | | NLCPFGEVFNATKFPSVYAWERKKISNCVADYSVLYNSTFFST |
| | | FKCYGVSATKLNDLCFSNVYADSFVVKGDDVRQIAPG |
| | | QTGVIADYNYKLPDDFMGCVLAWNTRNIDATSTGNYNYKYRY |
| | | LRHGKLRPFERDISNVPFSPDGKPCTPPALNCYWPLND |
| | | YGFYTTTGIGYQPYRVVVLSFELLNAPATVCGPKLSTDLIKNQC |
| | | VNFNFNGLTGTGVLTPSSKRFQPFQQFGRDVSDFTD |
| | | SVRDPKTSEILDISPCSFGGVSVITPGTNASSEVAVLYQDVNCT |
| | | DVSTAIHADQLTPAWRIYSTGNNVFQTQAGCLIGAE |
| | | HVDTSYECDIPIGAGICASYHTVSLLRSTSQKSIVAYTMSLGAD |
| | | SSIAYSNNTIAIPTNFSISITTEVMPVSMTKTSVDC |
| | | NMYICGDSTECANLLLQYGSFCTQLNRALSGIAAEQDRNTREV |
| | | FAQVKQMYKTPTLKYFGGFNFSQILPDPLKPTKRSFI |
| | | EDLLFNKVTLADAGFMKQYGECLGDINARDLICAQKFNGLTVL |
| | | PPLLTDDMIAAYTAALVSGTATAGWTFGAGAALQIPF |
| | | AMQMAYRFNGIGVTQNVLYENQKQIANQFNKAISQIQESLTTT |
| | | STALGKLQDVVNQNAQALNTLVKQLSSNFGAISSVLN |
| | | DILSRLDKVEAEVQIDRLITGRLQSLQTYVTQQLIRAAEIRASAN |
| | | LAATKMSECVLGQSKRVDFCGKGYHLMSFPQAAPH |
| | | GVVFLHVTYVPSQERNFTTAPAICHEGKAYFPREGVFVFNGTS |
| | | WFITQRNFFSPQIITTDNTFVSGNCDVVIGIINNTVY |
| | | DPLQPELDSFKEELDKYFKNHTSPDVDLGDISGINASVVNIQKE |
| | | IDRLNEVAKNLNESLIDLQELGKYEQYIKWPWYVWL |
| | | GFIAGLIAIVMVTILLCCMTSCCSCLKGACSCGSCCKFDEDDSE |
| | | PVLKGVKLHYT |
| 102 | SARS | MFIFLLFLTLTSGSDLDRCTTFDDVQAPNYTQHTSSMRGVYYP |
| | coronavirus | DEIFRSDTLYLTQDLFLPFYSNVTGFHTINHTFGNPV |
| | ExoN1 | IPFKDGIYFAATEKSNVVRGWVFGSTMNNKSQSVIIINNSTNVV |
| | Spike | IRACNFELCDNPFFAVSKPMGTQTHTMIFDNAFNCT |
| | glycoprotein | FEYISDAFSLDVSEKSGNFKHLREFVFKNKDGFLYVYKGYQPI |
| | precursor | DVVRDLPSGFNTLKPIFKLPLGINITNFRAILTAFSP |
| | (Genbank: | AQDIWGTSAAAYFVGYLKPTTFMLKYDENGTITDAVDCSQNPL |
| | ACZ71976) | AELKCSVKSFEIDKGIYQTSNFRVVPSGDVVRFPNIT |
| | | NLCPFGEVFNATKFPSVYAWERKKISNCVADYSVLYNSTFFST |
| | | FKCYGVSATKLNDLCFSNVYADSFVVKGDDVRQIAPG |
| | | QTGVIADYNYKLPDDFMGCVLAWNTRNIDATSTGNYNYKYRY |
| | | LRHGKLRPFERDISNVPFSPDGKPCTPPALNCYWPLND |
| | | YGFYTTTGIGYQPYRVVVLSFELLNAPATVCGPKLSTDLIKNQC |
| | | VNFNFNGLTGTGVLTPSSKRFQPFQQFGRDVSDFTD |
| | | SVRDPKTSEILDISPCSFGGVSVITPGTNASSEVAVLYQDVNCT |
| | | DVSTAIHADQLTPAWRIYSTGNNVFQTQAGCLIGAE |
| | | HVDTSYECDIPIGAGICASYHTVSLLRSTSQKSIVAYTMSLGAD |
| | | SSIAYSNNTIAIPTNFSISITTEVMPVSMTKTSVDC |
| | | NMYICGDSTECANLLLQYGSFCTQLNRALSGIAAEQDRNTREV |
| | | FAQVKQMYKTPTLKXFGGFNFSQILPDPLKPTKRSFI |
| | | EDLLFNKVTLADAGFMKQYGECLGDINARDLICAQKFNGLTVL |
| | | PPLLTDDMIAAYTAALVSGTATAGWTFGAGAALQIPF |
| | | AMQMAYRFNGIGVTQNVLYENQKQIANQFNKAISQIQESLTTT |
| | | STALGKLQDVVNQNAQALNTLVKQLSSNFGAISSVLN |
| | | DILSRLDKVEAEVQIDRLITGRLQSLQTYVTQQLIRAAEIRASAN |
| | | LAATKMSECVLGQSKRVDFCGKGYHLMSFPQAAPH |
| | | GVVFLHVTYVPSQERNFTTAPAICHEGKAYFPREGVFVFNGTS |
| | | WFITQRNFFSPQIITTDNTFVSGNCDVVIGIINNTVY |
| | | DPLQPELDSFKEELDKYFKNHTSPDVDLGDISGINASVVNIQKE |
| | | IDRLNEIAKNLNESLIDLQELGKYEQYIKWPWYVWL |
| | | GFIAGLIAIVMVTILLCCMTSCCSCLKGACSCGSCCKFDEDDSE |
| | | PVLKGVKLHYT |
| 103 | SARS | MFIFLLFLTLTSGSDLDRCTTFDDVQAPNYTQHTSSMRGVYYP |
| | coronavirus | DEIFRSDTLYLTQDLFLPFYSNVTGFHTINHTFGNPV |
| | ExoN1 | IPFKDGIYFAATEKSNVVRGWVFGSTMNNKSQSVIIINNSTNVV |
| | Spike | IRACNFELCDNPFFAVSKPMGTQTHTMIFDNAFNCT |
| | glycoprotein | FEYISDAFSLDVSEKSGNFKHLREFVFKNKDGFLYVYKGYQPI |
| | precursor | DVVRDLPSGFNTLKPIFKLPLGINITNFRAILTAFSP |
| | (Genbank: | AQDIWGTSAAAYFVGYLKPTTFMLKYDENGTITDAVDCSQNPL |
| | ACZ71961) | AELKCSVKSFEIDKGIYQTSNFRVVPSGDVVRFPNIT |
| | | NLCPFGEVFNATKFPSVYAWERKKISNCVADYSVLYNSTFFST |
| | | FKCYGVSATKLNDLCFSNVYADSFVVKGDDVRQIAPG |
| | | QTGVIADYNYKLPDDFMGCVLAWNTRNIDATSTGNYNYKYRY |
| | | LRHGKLRPFERDISNVPFSPDGKPCTPPALNCYWPLND |
| | | YGFYTTTGIGYQPYRVVVLSFELLNAPATVCGPKLSTDLIKNQC |
| | | VNFNFNGLTGTGVLTPSSKRFQPFQQFGRDVSDFTD |
| | | SVRDPKTSEILDISPCSFGGVSVITPGTNASSEVAVLYQDVNCT |
| | | DVSTAIHADQLTPAWRIYSTGNNVFQTQAGCLIGAE |
| | | HVDTSYECDIPIGAGICASYHTVSLLRSTSQKSIVAYTMSLGAD |
| | | SSIAYSNNTIAIPTNFSISITTEVMPVSMTKTSVDC |
| | | NMYICGDSTECANLLLQYGSFCTQLNRALSGIAAEQDRNTREV |
| | | FAQVKQMYKTPTLKYFGGFNFSQILPDPLKPTKRSFI |
| | | EDLLFNKVTLADAGFMKQYGECLGDINARDLICAQKFNGLTVL |
| | | PPLLTDDMIAAYTAALVSGTATAGWTFGAGAALQIPF |
| | | AMQMAYRFNGIGVTQNVLYENQKQIANQFNKAISQIQESFTTT |
| | | STALGKLQDVVNQNAQALNTLVKQLSSNFGAISSVLN |
| | | DILSRLDKVEAEVQIDRLITGRLQSLQTYVTQQLIRAAEIRASAN |
| | | LAATKMSECVLGQSKRVDFCGKGYHLMSFPQAAPH |
| | | GVVFLHVTYVPSQERNFTTAPAICHEGKAYFPREGVFVFNGTS |
| | | WFITQRNFFSPQIITTDNTFVSGNCDVVIGIINNTVY |
| | | DPLQPELNSFKEELDKYFKNHTSPDVDLGDISGINASVVNIQKE |
| | | IDRLNEVAKNLNESLIDLQELGKYEQYIKWPWYVWL |
| | | GFIAGLIAIVMVTILLCCMTSCCSCLKGACSCGSCCKFDEDDSE |
| | | PVLKGVKLHYT |
| 104 | SARS | MFIFLLFLTLTSGSDLDRCTTFDDVQAPNYTQHTSSMRGVYYP |
| | coronavirus | DEIFRSDTLYLTQDLFLPFYSNVTGFHTINHTFGNPV |
| | ExoN1 | IPFKDGIYFAATEKSNVVRGWVFGSTMNNKSQSVIIINNSTNVV |
| | Spike | IRACNFELCDNPFFAVSKPMGTQTHTMIFDNAFNCT |
| | glycoprotein | FEXISDAFSLDVSEKSGNFKHLREFVFKNKDGFLYVYKGYQPI |
| | precursor | DVVRDLPSGFNTLKPIFKLPLGINITNFRAILTAFSP |
| | (Genbank: | AQDIWGTSAAAYFVGYLKPTTFMLKYDENGTITDAVDCSQNPL |
| | ACZ72195) | AELKCSVKSFEIDKGIYQTSNFRVVPSGDVVRFPNIT |
| | | NLCPFGEVFNATKFPSVYAWERKKISNCVADYSVLYNSTFFST |
| | | FKCYGVSATKLNDLCFSNVYADSFVVKGDDVRQIAPG |
| | | QTGVIADYNYKLPDDFMGCVLAWNTRNIDATSTGNYNYKYRY |
| | | LRHGKLRPFERDISNVPFSPDGKPCTPPALNCYWPLND |
| | | YGFYTTTGIGYQPYRVVVLSFELLNAPATVCGPKLSTDLIKNQC |
| | | VNFNFNGLTGTGVLTPSSKRFQPFQQFGRDVSDFTD |
| | | SVRDPKTSEILDISPCSFGGVSVITPGTNASSEVAVLYQDVNCT |
| | | DVSTAIHADQLTPAWRIYSTGNNVFQTQAGCLIGAE |
| | | HVDTSYECDIPIGAGICASYHTVSLLRSTSQKSIVAYTMSLGAD |
| | | SSIAYSNNTIAIPTNFSISITTEVMPVSMTKTSVDC |
| | | NMYICGDSTECANLLLQYGSFCTQLNRALSGIAAEQDRNTREV |
| | | FAQVKQMYKTPTLKYFGGFNFSQILPDPLKPTKRSFI |
| | | EDLLFNKVTLADAGFMKQYGECLGDINARDLICAQKFNGLTVL |
| | | PPLLTDDMIAAYTAALVSGTATAGWTFGAGAALQIPF |
| | | AMQMAYRFNGIGVTQNVLYENQKQIANQFNKAISQIQESLTTT |
| | | STALGKLQDVVNQNAQALNTLVKQLSSNFGAISSVLN |
| | | DILSRLDKVEAEVQIDRLITGRLQSLQTYVTQQLIRAAEIRASAN |
| | | LAATKMSECVLGQSKRVDFCGKGYHLMSFPQAAPH |
| | | GVVFLHVTYVPSQERNFTTAPAICHEGKAYFPREGVFVFNGTS |
| | | WFITQRNFFSPQIITTDNTFVSGNCDVVIGIINNTVY |
| | | DPLQPELDSFKEELDKYFKNHTSPDVDLGDISGINASVVNIQKE |
| | | IDRLNEVAKNLNESLIDLQELGKYEQYIKWPWYVWL |
| | | GFIAGLIAIVMVTILLCCMTSCCSCLKGACSCGSCCKFDEDDSE |
| | | PVLKGVKLHYT |
| 105 | SARS | MFIFLLFLTLTSGSDLDRCTTFDDVQAPNYTQHTSSMRGVYYP |
| | coronavirus | DEIFRSDTLYLTQDLFLPFYSNVTGFHTINHTFGNPV |
| | ExoN1 | IPFKDGIYFAATEKSNVVRGWVFGSTMNNKSQSVIIINNSTNVV |
| | Spike | IRACNFELCDNPFFAVSKPMGTQTHTMIFDNAFNCT |
| | glycoprotein | FEYISDAFSLDVSEKSGNFKHLREFVFKNKDGFLYVYKGYQPI |
| | precursor | DVVRDLPSGFNTLKPIFKLPLGINITNFRAILTAFSP |
| | (Genbank: | AQDIWGTSAAAYFVGYLKPTTFMLKYDENGTITDAVDCSQNPL |
| | ACZ72108) | AELKCSVKSFEIDKGIYQTSNFRVVPSGDVVRFPNIT |
| | | NLCPFGEVFNATKFPSVYAWERKKISNCVADYSVLYNSTFFST |
| | | FKCYGVSATKLNDLCFSNVYADSFVVKGDDVRQIAPG |
| | | QTGVIADYNYKLPDDFMGCVLAWNTRNIDATSTGNYNYKYRY |
| | | LRHGKLRPFERDISNVPFSPDGKPCTPPALNCYWPLND |
| | | YGFYTTTGIGYQPYRVVVLSFELLNAPATVCGPKLSTDLIKNQC |
| | | VNFNFNGLTGTGVLTPSSKRFQPFQQFGRDVSDFTD |
| | | SVRDPKTSEILDISPCSFGGVSVITPGTNASSEVAVLYQDVNCT |
| | | DVSTAIHADQLTPAWRIYSTGNNVFQTQAGCLIGAE |
| | | HVDTSYECDIPIGAGICASYHTVSLLRSTSQKSIVVYTMSLGAD |
| | | SSIAYSNNTIAIPTNFSISITTEVMPVSMTKTSVDC |
| | | NMYICGDSTECANLLLQYGSFCTQLNRALSGIAAEQDRNTREV |
| | | FAQVKQMYKTPTLKYFGGFNFSQILPDPLKPTKRSFI |
| | | EDLLFNKVTLADAGFMKQYGECLGDINARDLICAQKFNGLTVL |
| | | PPLLTDDMIAAYTAALVSGTATAGWTFGAGAALQIPF |
| | | AMQMAYRFNGIGVTQNVLYENQKQIANQFNKAISQIQESLTTT |
| | | STALGKLQDVVNQNAQALNTLVKQLSSNFGAISSVLN |
| | | DILSRLDKVEAEVQIDRLITGRLQSLQTYVTQQLIRAAEIRASAN |
| | | LAATKMSECVLGQSKRVDFCGKGYHLMSFPQAAPH |
| | | GVVFLHVTYVPSQERNFTTAPAICHEGKAYFPREGVFVFNGTS |
| | | WFITQRNFFSPQIITTDNTFVSGNCDVVIGIINNTVY |
| | | DPLQPELDSFKEELDKYFKNHTSPDVDLGDISGINASVVNIQKE |
| | | IDRLNEVAKNLNESLIDLQELGKYEQYIKWPWYVWL |
| | | GFIAGLIAIVMVTILLCCMTSCCSCLKGACSCGSCCKFDEDDSE |
| | | PVLKGVKLHYT |
| 106 | SARS | MFIFLLFLTLTSGSDLDRCTTFDDVQAPNYTQHTSSMRGVYYP |
| | coronavirus | DEIFRSDTLYLTQDLFLPFYSNVTGFHTINHTFGNPV |
| | ExoN1 | IPFKDGIYFAATEKSNVVRGWVFGSTMNNKSQSVIIINNSTNVV |
| | Spike | IRACNFELCDNPFFAVSKPMGTQTHTMIFDNAFNCT |
| | glycoprotein | FEYISDAFSLDVSEKSGNFKHLREFVFKNKDGFLYVYKGYQPI |
| | precursor | DVVRDLPSGFNTLKPIFKLPLGINITNFRAILTAFSP |
| | (Genbank: | AQDIWGTSAAAYFVGYLKPTTFMLKYDENGTITDAVDCSQNPL |
| | ACZ71826) | AELKCSVKSFEIDKGIYQTSNFRVVPSGDVVRFPNIT |
| | | NLCPFGEVFNATKFPSVYAWERKKISNCVADYSVLYNSTFFST |
| | | FKCYGVSATKLNDLCFSNVYADSFVVKGDDVRQIAPG |
| | | QTGVIADYNYKLPDDFMGCVLAWNTRNIDATSTGNYNYKYRY |
| | | LRHGKLRPFERDISNVPFSPDGKPCTPPALNCYWPLND |
| | | YGFYTTTGIGYQPYRVVVLSFELLNAPATVCGPKLSTDLIKNQC |
| | | VNFNFNGLTGTGVLTPSSKRFQPFQQFGRDVSDFTD |
| | | SVRDPKTSEILDISPCSFGGVSVITPGTNASSEVAVLYQDVNCT |
| | | DVSTAIHADQLTPAWRIYSTGNNVFQTQAGCLIGAE |
| | | HVDTSYECDIPIGAGICASYHTVSLLRSTSQKSIVAYTMSLGAD |
| | | SSIAYSNNTIAIPTNFSISITTEVMPVSMTKTSVDC |
| | | NMYICGDSTECANLLLQYGSFCTQLNRALSGIAAEQDRNTREV |
| | | FAQVKQMYKTPTLKYFGGFNFSQILPDPLKPTKRSFI |
| | | EDLLFNKVTLADAGFMKQYGECLGDINARDLICAQKFNGLTVL |
| | | PPLLTDDMIAAYTAALVSGTATAGWTFGAGAALQIPF |
| | | AMQMAYRFNGIGVTQNVLYENQKQIANQFNKAISQIQESLTTT |
| | | STALGKLQDVVNQNAQALNTLVKQLSSNFGAISSVLN |
| | | DILSRLDKVEAEVQIDRLITGRLQSLQTYVTQQLIRAAEIRASAN |
| | | LAATKMSECVLGQSKRVDFCGKGYHLMSFPQAAPH |
| | | GVVFLHVTYVPSQERNFTTAPAICHEGKAYFPREGVFVFNGTS |
| | | WFITQRNFFSPQIITTDNTFVSGNCDVVIGIINNTVY |
| | | DPLQPELDSFKEELDKYFKNHTSPDVDLGDISGINASVVNIQKE |
| | | IDRLNEVAKNLNESLIDLQELGKYEQYIKWPWYVWL |
| | | GFIAGLIAIVMVTILLCCMTSCCSCLKGACSCGSCCKFDEDDSE |
| | | PVLKGVKLHYT |
| 107 | SARS | MFIFLLFLTLTSGSDLDRCTTFDDVQAPNYTQHTSSMRGVYYP |
| | coronavirus | DEIFRSDTLYLTQDLFLPFYSNVTGFHTINHTFGNPV |
| | ExoN1 | IPFKDGIYFAATEKSNVVRGWVFGSTMNNKSQSVIIINNSTNVV |
| | Spike | IRACNFELCDNPFFAVSKPMGTQTHTMIFDNAFNCT |
| | glycoprotein | FEYISDAFSLDVSEKSGNFKHLREFVFKNKDGFLYVYKGYQPI |
| | precursor | DVVRDLPSGFNTLKPIFKLPLGINITNFRAILTAFSP |
| | (Genbank: | AQDIWGTSAAAYFVGYLKPTTFMLKYDENGTITDAVDCSQNPL |
| | ACZ72254) | AELKCSVKSFEIDKGIYQTSNFRVVPSGDVVRFPNIT |
| | | NLCPFGEVFNATKFPSVYAWERKKISNCVADYSVLYNSTFFST |
| | | FKCYGVSATKLNDLCFSNVYADSFVVKGDDVRQIAPG |
| | | QTGVIADYNYKLPDDFMGCVLAWNTRNIDATSTGNYNYKYRY |
| | | LRHGKLRPFERDISNVPFSPDGKPCTPPALNCYWPLND |
| | | YGFYTTTGIGYQPYRVVVLSFELLNAPATVCGPKLSTDLIKNQC |
| | | VNFNFNGLTGTGVLTPSSKRFQPFQQFGRDVSDFTD |
| | | SVRDPKTSEILDISPCSFGGVSVITPGTNASSEVAVLYQDVNCT |
| | | DVSTAIHADQLTPAWRIYSTGNNVFQTQAGCLIGAE |
| | | HVDTSYECDIPIGAGICASYHTVSLLRSTSQKSIVAYTMSLGAD |
| | | SSIAYSNNTIAIPTNFSISITTEVMPVSMTKTSVDC |
| | | NMYICGDSTECANLLLQYGSFCTQLNRALSGIAAEQDRNTREV |
| | | FAQVKQMYKTPTLKYFGGFNFSQILPDPLKPTKRSFI |
| | | EDLLFNKVTLADAGFMKQYGECLGDINARDLICAQKFNGLTVL |
| | | PPLLTDDMIAAYTAALVSGTATAGWTFGAGAALQIPF |
| | | AMQMAYRFNGIGVTQNVLYENQKQIANQFNKAISQIQESLTTT |
| | | STALGKLQDVVNQNAQALNTLVKQLSSNFGAISSVLN |
| | | DILSRLDKVEAEVQIDRLITGRLQSLQTYVTQQLIRAAEIRASAN |
| | | LAATKMSECVLGQSKRVDFCGKGYHLMSFPQAAPH |
| | | GVVFLHVTYVPSQERNFTTAPAICHEGKAYFPREGVFVFNGTS |
| | | WFITQRNFFSPQIITTDNTFVSGNCDVVIGIINNTVY |
| | | DPLQPELDSFKEELDKYFKIHTSPDVDLGDISGINASVVNIQKEI |
| | | DRLNEVAKNLNESLIDLQELGKYEQYIKWPWYVWL |
| | | GFIAGLIAIVMVTILLCCMTSCCSCLKGACSCGSCCKFDEDDSE |
| | | PVLKGVKLHYT |
| 108 | SARS-related | MFIFLLFLTLTSGSDLDRCTTFDDVQAPNYTQHTSSMRGVYYP |
| | coronavirus | DEIFRSDTLYLTQDLFLPFYSNVTGFHTINHTFGNPV |
| | Spike | IPFKDGIYFAATEKSNVVRGWVFGSTMNNKSQSVIIINNSTNVV |
| | glycoprotein | IRACNFELCDNPFFAVSKPMGTQTHTMIFDNAFNCT |
| | (Genbank: | FEYISDAFSLDVSEKSGNFKHLREFVFKNKDGFLYVYKGYQPI |
| | ABD72972) | DVVRDLPSGFNTLKPIFKLPLGINITNFRAILTAFSP |
| | | AQDIWGTSAAAYFVGYLKPTTFMLKYDENGTITDAVDCSQNPL |
| | | AELKCSVKSFEIDKGIYQTSNFRVVPSGDVVRFPNIT |
| | | NLCPFGEVFNATKFPSVYAWERKKISNCVADYSVLYNSTFFST |
| | | FKCYGVSATKLNDLCFSNVYADSFVVKGDDVRQIAPG |
| | | QTGVIADYNYKLPDDFMGCVLAWNTRNIDATSTGNYNYKYRY |
| | | LRHGKLRPFERDISNVPFSPNGKPCTPPALNCYWPLND |
| | | YGFYTTTGIGYQPYRVVVLSFELLNAPATVCGPKLSTDLIKNQC |
| | | VNFNFNGLTGTGVLTPSSKRFQPFQQFGRDVSDFTD |
| | | SVRDPKTSEILDISPCSFGGVSVITPGTNASSEVAVLYQDVNCT |
| | | DVSTAIHADQLTPAWRIYSTGNNVFQTQAGCLIGAE |
| | | HVDTSYECDIPIGAGICASYHTVSLLRSTSQKSIVAYTMSLGAD |
| | | SSIAYSNNTIAIPTNFSISITTEVMPVSMAKTSVDC |
| | | NMYICGDSTECANLLLQYGSFCTQLNRALSGIAAEQDRNTREV |
| | | FAQVKQMYKTPTLKYFGGFNFSQILPDPLKPTKRSFI |
| | | EDLLFNKVTLADAGFMKQYGECLGDINARDLICAQKFNGLTVL |
| | | PPLLTDDMIAAYTAALVSGTATAGWTFGAGAALQIPF |
| | | AMQMAYRFNGIGVTQNVLYENQKQIANQFNKAISQIQESLTTT |
| | | STALGKLQDVVNQNAQALNTLVKQLSSNFGAISSVLN |
| | | DILSRLDKVEAEVQIDRLITGRLQSLQTYVTQQLIRAAEIRASAN |
| | | LAATKMSECVLGQSKRVDFCGKGYHLMSFPQAAPH |
| | | GVVFLHVTYVPSQERNFTTAPAICHEGKAYFPREGVFVFNGTS |
| | | WFITQRNFFSPQIITTDNTFVSGNCDVVIGIINNTVY |
| | | DPLQPELDSFKEELDKYFKNHTSPDVDLGDISGINASVVNIQKE |
| | | IDRLNEVAKNLNESLIDLQELGKYEQYIKWPWYVWL |
| | | GFIAGLIAIVMVTILLCCMTSCCSCLKGACSCGSCCKFDEDDSE |
| | | PVLKGVKLHYT |
| 109 | SARS | MFIFLLFLTLTSGSDLDRCTTFDDVQAPNYTQHTSSMRGVYYP |
| | coronavirus | DEIFRSDTLYLTQDLFLPFYSNVTGFHTINHTFGNPV |
| | MA15 ExoN1 | IPFKDGIYFAATEKSNVVRGWVFGSTMNNKSQSVIIINNSTNVV |
| | Spike | IRACNFELCDNPFFVVSKPMGTQTHTMIFDNAFNCT |
| | glycoprotein | FEYISDAFSLDVSEKSGNFKHLREFVFKNKDGFLYVYKGYQPI |
| | precursor | DVVRDLPSGFNTLKPIFKLPLGINITNFRAILTAFSP |
| | (Genbank: | AQDIWGTSAAAYFVGYLKPTTFMLKYDENGTITDAVDCSQNPL |
| | ACZ71991) | AELKCSVKSFEIDKGIYQTSNFRVVPSGDVVRFPNIT |
| | | NLCPFGEVFNATKFPSVYAWERKKISNCVADYSVLYNSTFFST |
| | | FKCYGVSATKLNDLCFSNVYADSFVVKGDDVRQIAPG |
| | | QTGVIADYNYKLPDDFMGCVLAWNTRNIDATSTGNHNYKYRY |
| | | LRHGKLRPFERDISNVPFSPDGKPCTPPALNCYWPLND |
| | | YGFYTTTGIGYQPYRVVVLSFELLNAPATVCGPKLSTDLIKNQC |
| | | VNFNFNGLTGTGVLTPSSKRFQPFQQFGRDVSDFTD |
| | | SVRDPKTSEILDISPCSFGGVSVITPGTNASSEVAVLYQDVNCT |
| | | DVSTAIHADQLTPAWRIYSTGNNVFQTQAGCLIGAE |
| | | HVDTSYECDIPIGAGICASYHTVSLLRSTSQKSIVAYTMSLGAD |
| | | SSIAYSNNTIAIPTNFSISITTEVMPVSMAKTSVDC |
| | | NMYICGDSTECANLLLQYGSFCTQLNRALSGIAAEQDRNTREV |
| | | FAQVKQMYKTPTLKYFGGFNFSQMLPDPLKPTKRSFI |
| | | EDLLFNKVTLADAGFMKQYGECLGDINARDLICAQKFNGLTVL |
| | | PPLLTDDMIAAYTAALVSGTATAGWTFGAGAALQIPF |
| | | AMQMAYRFNGIGVTQNVLYENQKQIANQFNKAISQIQESLTTT |
| | | STALGKLQDVVNQNAQALNTLVKQLSSNFGAISSVLN |
| | | DILSRLDKVEAEVQIDRLITGRLQSLQTYVTQQLIRAAEIRASAN |
| | | LAATKMSECVLGQSKRVDFCGKGYHLMSFPQAAPH |
| | | GVVFLHVTYVPSQERNFTTAPAICHEGKAYFPREGVFVFNGTS |
| | | WFITQRNFFSPQIITTDNTFVSGNCDVVIGIINNTVY |
| | | DPLQPELDSFKEELDKYFKNHTSPDVDLGDISGINASVVNIQKE |
| | | IDRLNEVAKNLNESLIDLQELGKYEQYIKWPWYVWL |
| | | GFIAGLIAIVMVTILLCCMTSCCSCLKGACSCGSCCKFDEDDSE |
| | | PVLKGVKLHYT |
| 110 | SARS | MFIFLLFLTLTSGSDLDRCTTFDDVQAPNYTQHTSSMRGVYYP |
| | coronavirus | DEIFRSDTLYLTQDLFLPFYSNVTGFHTINHTFGNPV |
| | MA15 ExoN1 | IPFKDGIYFAATEKSNVVRGWVFGSTMNNKSQSVIIINNSTNVV |
| | Spike | IRACNFELCDNPFFAVSKPMGTQTHTMIFDNAFNCT |
| | glycoprotein | FEYISDAFSLDVSEKSGNFKHLREFVFKNKDGFLYVYKGYQPI |
| | precursor | DVVRDLPSGFNTLKPIFKLPLGINITNFRAILTAFSP |
| | (Genbank: | AQDIWGTSAAAYFVGYLKPTTFMLKYDENGTITDAVDCSQNPL |
| | ACZ72122) | AELKCSVKSFEIDKGIYQTSNFRVVPSGDVVRFPNIT |
| | | NLCPFGEVFNATKFPSVYAWERKKISNCVADYSVLYNSTFFST |
| | | FKCYGVSATKLNDLCFSNVYADSFVVKGDDVRQIAPG |
| | | QTGVIADYNYKLPDDFMGCVLAWNTRNIDATSTGNHNYKYRY |
| | | LRHGKLRPFERDISNVPFSPDGKPCTPPALNCYWPLND |
| | | YGFYTTTGIGYQPYRVVVLSFELLNAPATVCGPKLSTDLIKNQC |
| | | VNFNFNGLTGTGVLTPSSKRFQPFQQFGRDVSDFTD |
| | | SVRDPKTSEILDISPCSFGGVSVITPGTNASSEVAVLYQDVNCT |
| | | DVSTAIHADQLTPAWRIYSTGNNVFQTQAGCLIGAE |
| | | HVDTSYECDIPIGAGICASYHTVSLLRSTSQKSIVAYTMSLGAD |
| | | SSIAYSNNTIAIPTNFSISITTEVMPVSMAKTSVDC |
| | | NMYICGDSTECANLLLQYGSFCTQLNRALSGIAAEQDRNTREV |
| | | FAQVKQMYKTPTLKYFGGFNFSQMLPDPLKPTKRSFI |
| | | EDLLFNKVTLADAGFMKQYGECLGDINARDLICAQKFNGLTVL |
| | | PPLLTDDMIAAYTAALVSGTATAGWTFGAGAALQIPF |
| | | AMQMAYRFNGIGVTQNVLYENQKQIANQFNKAISQIQESLTTT |
| | | STALGKLQDVVNQNAQALNTLVKQLSSNFGAISSVLN |
| | | DILSRLDKVEAEVQIDRLITGRLQSLQTYVTQQLIRAAEIRASAN |
| | | LAATKMSECVLGQSKRVDFCGKGYHLMSFPQAAPH |
| | | GVVFLHVTYVPSQERNFTTAPAICHEGKAYFPREGVFVFNGTS |
| | | WFITQRNFFSPQIITTDNTFVSGNCDVVIGIINNTVY |
| | | DPLQPELDSFKEELDKYFKNHTSPDVDLGDISGINASVVNIQKE |
| | | IDRLNEVAKNLNESLIDLQELGKYEQYIKWPWYVWL |
| | | GFIAGLIAIVMVTILLCCMTSCCSCLKGACSCGSCCKFDEDDSE |
| | | PVLKGVKLHYT |
| 111 | SARS | MFIFLLFLTLTSGSDLDRCTTFDDVQAPNYTQHTSSMRGVYYP |
| | coronavirus | DEIFRSDTLYLTQDLFLPFYSNVTGFHTINHTFGNPV |
| | MA15 ExoN1 | IPFKDGIYFAATEKSNVVRGWVFGSTMNNKSQSVIIINNSTNVV |
| | Spike | IRACNFELCDNPFFAVSKPMGTQTHTMIFDNAFNCT |
| | glycoprotein | FEYISDAFSLDVSEKSGNFKHLREFVFKNKDGFLYVYKGYQPI |
| | precursor | DVVRDLPSGFNTLKPIFKLPLGINITNFRAILTAFSP |
| | (Genbank: | AQDIWGTSAAAYFVGYLKPTTFMLKYDENGTITDAVDCSQNPL |
| | AEA10443) | AELKCSVKSFEIDKGIYQTSNFRVVPSGDVVRFPNIT |
| | | NLCPFGEVFNATKFPSVYAWERKKISNCVADYSVLYNSTFFST |
| | | FKCYGVSATKLNDLCFSNVYADSFVVKGDDVRQIAPG |
| | | QTGVIADYNYKLPDDFMGCVLAWNTRNIDATSTGNHNYKYRY |
| | | LXHGKLRPFERDISNVPFSPDGKPCTPPALNCYWPLND |
| | | YGFYTTTGIGYQPYRVVVLSFELLNAPATVCGPKLSTDLIKNQC |
| | | VNFNFNGLTGTGVLTPSSKRFQPFQQFGRDVSDFTD |
| | | SVRDPKTSEILDISPCSFGGVSVITPGTNASSEVAVLYQDVNCT |
| | | DVSTAIHADQLTPAWRIYSTGNNVFQTQAGCLIGAE |
| | | HVDTSYECDIPIGAGICASYHTVSLLRSTSQKSIVAYTMSLGAD |
| | | SSIAYSNNTIAIPTNFSISITTEVMPVSMAKTSVDC |
| | | NMYICGDSTECANLLLQYGSFCTQLNRALSGIAAEQDRNTREV |
| | | FAQVKQMYKTPTLKYFGGFNFSQILPDPLKPTKRSFI |
| | | EDLLFNKVTLADAGFMKQYGECLGDINARDLICAQKFNGLTVL |
| | | PPLLTDDMIAAYTAALVSGTATAGWTFGAGAALQIPF |
| | | AMQMAYRFNGIGVTQNVLYENQKQIANQFNKAISQIQESLTTT |
| | | STALGKLQDVVNQNAQALNTLVKQLSSNFGAISSVLN |
| | | DILSRLDKVEAEVQIDRLITGRLQSLQTYVTQQLIRAAEIRASAN |
| | | LAATKMSECVLGQSKRVDFCGKGYHLMSFPQAAPH |
| | | GVVFLHVTYVPSQERNFTTAPAICHEGKAYFPREGVFVFNGTS |
| | | WFITQRNFFSPQIITTDNTFVSGNCDVVIGIINNTVY |
| | | DPLQPELDSFKEELDKYFKNHTSPDVDLGDISGINASVVNIQKE |
| | | IDRLNEVAKNLNESLIDLQELGKYEQYIKWPWYVWL |
| | | GFIAGLIAIVMVTILLCCMTSCCSCLKGACSCGSCCKFDEDDSE |
| | | PVLKGVKLHYT |
| 112 | SARS | MFIFLLFLTLTSGSDLDRCTTFDDVQAPNYTQHTSSMRGVYYP |
| | coronavirus | DEIFRSDTLYLTQDLFLPFYSNVTGFHTINHTFGNPV |
| | MA15 | IPFKDGIYFAATEKSNVVRGWVFGSTMNNKSQSVIIINNSTNVV |
| | Spike | IRACNFELCDNPFFAVSKPMGTQTHTMIFDNAFNCT |
| | glycoprotein | FEYISDAFSLDVSEKSGNFKHLREFVFKNKDGFLYVYKGYQPI |
| | precursor | DVVRDLPSGFNTLKPIFKLPLGINITNFRAILTAFSP |
| | (Genbank: | AQDIWGTSAAAYFVGYLKPTTFMLKYDENGTITDAVDCSQNPL |
| | ACZ72035) | AELKCSVKSFEIDKGIYQTSNFRVVPSGDVVRFPNIT |
| | | NLCPFGEVFNATKFPSVYAWERKKISNCVADYSVLYNSTFFST |
| | | FKCYGVSATKLNDLCFSNVYADSFVVKGDDVRQIAPG |
| | | QTGVIADYNYKLPDDFMGCVLAWNTRNIDATSTGNHNYKYRY |
| | | LRHGKLRPFERDISNVPFSPDGKPCTPPALNCYWPLND |
| | | YGFYTTTGIGYQPYRVVVLSFELLNAPATVCGPKLSTDLIKNQC |
| | | VNFNFNGLTGTGVLTPSSKRFQPFQQFGRDVSDFTD |
| | | SVRDPKTSEILDISPCSFGGVSVITPGTNASSEVAVLYQDVNCT |
| | | DVSTAIHADQLTPAWRIYSTGNNVFQTQAGCLIGAE |
| | | HVDTSYECDIPIGAGICASYHTVSLLRSTSQKSIVAYTMSLGAD |
| | | SSIAYSNNTIAIPTNFSISITTEVMPVSMAKTSVDC |
| | | NMYICGDSTECANLLLQYGSFCTQLNRALSGIAAEQDRNTREV |
| | | FAQVKQMYKTPTLKYFGGFNFSQILPDPLKPTKRSFI |
| | | EDLLFNKVTLADAGFMKQYGECLGDINARDLICAQKFNGLTVL |
| | | PPLLTDDMIAAYTAALVSGTATAGWTFGAGAALQIPF |
| | | AMQMAYRFNGIGVTQNVLYENQKQIANQFNKAISQIQESLTTT |
| | | STALGKLQDVVNQNAQALNTLVKQLSSNFGAISSVLN |
| | | DILSRLDKVEAEVQIDRLITGRLQSLQTYVTQQLIRAAEIRASAN |
| | | LAATKMSECVLGQSKRVDFCGKGYHLMSFPQAAPH |
| | | GVVFLHVTYVPSQERNFTTAPAICHEGKAYFPREGVFVFNGTS |
| | | WFITQRNFFSPQIITTDNTFVSGNCDVVIGIINNTVY |
| | | DPLQPELDSFKEELDKYFKNHTSPDVDLGDISGINASVVNIQKE |
| | | IDRLNEVAKNLNESLIDLQELGKYEQYIKWPWYVWL |
| | | GFIAGLIAIVMVTILLCCMTSCCSCLKGACSCGSCCKFDEDDSE |
| | | PVLKGVKLHYT |
| 113 | SARS | MFIFLLFLTLTSGSDLDRCTTFDDVQAPNYTQHTSSMRGVYYP |
| | coronavirus | DEIFRSDTLYLTQDLFLPFYSNVTGFHTINHTFGNPV |
| | MA15 ExoN1 | IPFKDGIYFAATEKSNVVRGWVFGSTMNNKSQSVIIINNSTNVV |
| | Spike | IRACNFELCDNPFFAVSKPMGTQTHTMIFDNAFNCT |
| | glycoprotein | FEYISDAFSLDVSEKSGNFKHLREFVFKNKDGFLYVYKGYQPI |
| | precursor | DVVRDLPSGFNTLKPIFKLPLGINITNFRAILTAFSP |
| | (GenBank: | AQDIWGTSAAAYFVGYLKPTTFMLKYDENGTITDAVDCSQNPL |
| | AEA10473) | AELKCSVKSFEIDKGIYQTSNFRVVPSGDVVRFPNIT |
| | | NLCPFGEVFNATKFPSVYAWERKKISNCVADYSVLYNSTFFST |
| | | FKCYGVSATKLNDLCFSNVYADSFVVKGDDVRQIAPG |
| | | QTGVIADYNYKLPDDFMGCVLAWNTRNIDATSTGNHNYKYRY |
| | | LRHGKLRPFERDISNVPFSPDGKPCTPPALNCYWPLND |
| | | YGFYTTTGIGYQPYRVVVLSFELLNAPATVCGPKLSTDLIKNQC |
| | | VNFNFNGLTGTGVLTPSSKRFQPFQQFGRDVSDFTD |
| | | SVRDPKTSEILDISPCSFGGVSVITPGTNASSEVAVLYQDVNCT |
| | | DVSTAIHADQLTPAWRIYSTGNNVFQTQAGCLIGAE |
| | | HVDTSYECDIPIGAGICASYHTVSLLRSTSQKSIVAYTMSLGAD |
| | | SSIAYSNNTIAIPTNFSISITTEVMPVSMAKXSVDC |
| | | NMYICGDSTECANLLLQYGSFCTQLNRALSGIAAEQDRNTREV |
| | | FAQVKQMYKTPTLKYFGGFNFSQILPDPLKPTKRSFI |
| | | EDLLFNKVTLADAGFMKQYGECLGDINARDLICAQKFNGLTVL |
| | | PPLLTDDMIAAYTAALVSGTATAGWTFGAGAALQIPF |
| | | AMQMAYRFNGIGVTQNVLYENQKQIANQFNKAISQIQESLTTT |
| | | STALGKLQDVVNQNAQALNTLVKQLSSNFGAISSVLN |
| | | DILSRLDKVEAEVQIDRLITGRLQSLQTYVTQQLIRAAEIRASAN |
| | | LAATKMSECVLGQSKRVDFCGKGYHLMSFPQAAPH |
| | | GVVFLHVTYVPSQERNFTTAPAICHEGKAYFPREGVFVFNGTS |
| | | WFITQRNFFSPQIITTDNTFVSGNCDVVIGIINNTVY |
| | | DPLQPELDSFKEELDKYFKNHTSPDVDLGDISGINASVVNIQKE |
| | | IDRLNEVAKNLNESLIDLQELGKYEQYIKWPWYVWL |
| | | GFIAGLIAIVMVTILLCCMTSCCSCLKGACSCGSCCKFDEDDSE |
| | | PVLKGVKLHYT |
| 114 | SARS-related | MFIFLLFLTLTSGSDLDRCTTFDDVQAPNYTQHTSSMRGVYYP |
| | coronavirus | DEIFRSDTLYLTQDLFLPFYSNVTGFHTINHTFGNPV |
| | Spike | IPFKDGIYFAATEKSNVVRGWVFGSTMNNKSQSVIIINNSTNVV |
| | glycoprotein | IRACNFELCDNPFIAVSKPMGTQTHTMIFDNAFNCT |
| | (GenBank: | FEYISDAFSLDVSEKSGNFKHLREFVFKNKDGFLYVYKGYQPI |
| | ABD73001) | DVVRDLPSGFNTLKPIFKLPLGINITNFRAILTAFSP |
| | | AQDIWGTSAAAYFVGYLKPTTFMLKYDENGTITDAVDCSQNPL |
| | | AELKCSVKSFEIDKGIYQTSNFRVVPSGDVVRFPNIT |
| | | NLCPFGEVFNATKFPSVYAWERKKISNCVADYSVLYNSTFFST |
| | | FKCYGVSATKLNDLCFSNVYADSFVVKGDDVRQIAPG |
| | | QTGVIADYNYKLPDDFMGCVLAWNTRNIDATSTGNYNYKYRY |
| | | LRHGKLRPFERDISNVPFSPDGKPCTPPALNCYWPLND |
| | | YGFYTTTGIGYQPYRVVVLSFELLNAPATVCGPKLSTDLIKNQC |
| | | VNFNFNGLTGTGVLTPSSKRFQPFQQFGRDVSDFTD |
| | | SVRDPKTSEILDISPCSFGGVSVITPGTNASSEVAVLYQDVNCT |
| | | DVSTAIHADQLTPAWRIYSTGNNVFQTQAGCLIGAE |
| | | HVDTSYECDIPIGAGICASYHTVSLLRSTSQKSIVAYTMSLGAD |
| | | SSIAYSNNTIAIPTNFSISITTEVMPVSMAKTSVDC |
| | | NMYICGDSTECANLLLQYGSFCTQLNRALSGIAAEQDRNTREV |
| | | FAQVKQMYKTPTLKYFGGFNFSQILPDPLKPTKRSFI |
| | | EDLLFNKVTLADAGFMKQYGECLGDINARDLICAQKFNGLTVL |
| | | PPLLTDDMIAAYTAALVSGTATAGWTFGAGAALQIPF |
| | | AMQMAYRFNGIGVTQNVLYENQKQIANQFNKAISQIQESLTTT |
| | | STALGKLQDVVNQNAQALNTLVKQLSSNFGAISSVLN |
| | | DILSRLDKVEAEVQIDRLITGRLQSLQTYVTQQLIRAAEIRASAN |
| | | LAATKMSECVLGQSKRVDFCGKGYHLMSFPQAAPH |
| | | GVVFLHVTYVPSQERNFTTAPAICHEGKAYFPREGVFVFNGTS |
| | | WFITQRNFFSPQIITTDNTFVSGNCDVVIGIINNTVY |
| | | DPLQPELDSFKEELDKYFKNHTSPDVDLGDISGINASVVNIQKE |
| | | IDRLNEVAKNLNESLIDLQELGKYEQYIKWPWYVWL |
| | | GFIAGLIVIVMVTILLCCMTSCCSCLKGACSCGSCCKFDEDDSE |
| | | PVLKGVKLHYT |
| 115 | SARS-related | MFIFLLFLTLTSGSDLDRCTTFDDVQAPNYTQHTSSMRGVYYP |
| | coronavirus | DEIFRSDTLYLTQDLFLPFYSNVTGFHTINHTFGNPV |
| | Spike | IPFKDGIYFAATEKSNVVRGWVFGSTMNNKSQSVIIINNSTNVV |
| | glycoprotein | IRACNFELCDNPFFAVSKPMGTQTHTMIFDNAFNCT |
| | (GenBank: | FEYISDAFSLDVSEKSGNFKHLREFVFKNKDGFLYVYKGYQPI |
| | ABD72970) | DVVRDLPSGFNTLKPIFKLPLGINITNFRAILTAFSP |
| | | AQDIWGTSAAAYFVGYLKPTTFMLKYDENGTITDAVDCSQNPL |
| | | AELKCSVKSFEIDKGIYQTSNFRVVPSGDVVRFPNIT |
| | | NLCPFGEVFNATKFPSVYAWERKKISNCVADYSVLYNSTFFST |
| | | FKCYGVSATKLNDLCFSNVYADSFVVKGDDVRQIAPG |
| | | QTGVIADYNYKLPDDFMGCVLAWNTRNIDATSTGNYNYKYRY |
| | | LRHGKLRPFERDISNVPFSPDGKPCTPPALNCYWPLND |
| | | YGFYTTTGIGYQPYRVVVLSFELLNAPATVCGPKLSTDLIKNQC |
| | | VNFNFNGLTGTGVLTPSSKRFQPFQQFGRDVSDFTD |
| | | SVRDPKTSEILDISPCSFGGVSVITPGTNASSEVAVLYQDVNCT |
| | | DVSTAIHADQLTPAWRIYSTGNNVFQTQAGCLIGAE |
| | | HVDTSYECDIPIGAGICASYHTVSLLRSTSQKSIVAYTMSLGAD |
| | | SSIAYSNNTIAIPTNFSISITTEVMPVSMAKTSVDC |
| | | NMYICGDSTECANLLLQYGSFCTQLNRALSGIAAEQDRNTREV |
| | | FAQVKQMYKTPTLKYFGGFNFSQILPDPLKPTKRSFI |
| | | EDLLFNKVTLADAGFMKQYGECLGDINARDLICAQKFNGLTVL |
| | | PPLLTDDMIAAYTAALVSGTATAGWTFGAGAALQIPF |
| | | AMQMAYRFNGIGVTQNVLYENQKQIANQFNKAISQIQESLTTT |
| | | STALGKLQDVVNQNAQALNTLVKQLSSNFGAISSVLN |
| | | DILSRLDKVEAEVQIDRLITGRLQSLQTYVTQQLIRAAEIRASAN |
| | | LAATKMSECVLGQSKRVDFCGKGYHLMSFPQAAPH |
| | | GVVFLHVTYVPSQERNFTTAPAICHEGKAYFPREGVFVFNGTS |
| | | WFITQRNFFSPQIITTDNTFVSGNCDVVIGIINNTVY |
| | | DPLQPELDSFKEELDKYFKNHTSPDVDLGDISGINASVVNIQKE |
| | | IDRLNEVAKNLNESLIDLQELGKYEQYIKWPWYVWL |
| | | GFIAGLIVIVMVTILLCCMTSCCSCLKGACSCGSCCKFDEDDSE |
| | | PVLKGVKLHYT |
| 116 | SARS-related | MFIFLLFLTLTNGSDLDRCTTFDDVQAPNYTQHTSSMRGVYYP |
| | coronavirus | DEIFRSDTLYLTQDLFLPFYSNVTGFHTINHTFGNPV |
| | Spike | IPFKDGIYFAATEKSNVVRGWVFGSTMNNKSQSVIIINNSTNVV |
| | glycoprotein | IRACNFELCDNPFFAVSKPMGTQTHTMIFDNAFNCT |
| | (GenBank: | FEYISDAFSLDVSEKSGNFKHLREFVFKNKDGFLYVYKGYQPI |
| | ABD72988) | DVVRDLPSGFNTLKPIFKLPLGINITNFRAILTAFSP |
| | | AQDIWGTSAAAYFVGYLKPTTFMLKYDENGTITDAVDCSQNPL |
| | | AELKCSVKSFEIDKGIYQTSNFRVVPSGDVVRFPNIT |
| | | NLCPFGEVFNATKFPSVYAWERKKISNCVADYSVLYNSTFFST |
| | | FKCYGVSATKLNDLCFSNVYADSFVVKGDDVRQIAPG |
| | | QTGVIADYNYKLPDDFMGCVLAWNTRNIDATSTGNYNYKYRY |
| | | LRHGKLRPFERDISNVPFSPDGKPCTPPALNCYWPLND |
| | | YGFYTTTGIGYQPYRVVVLSFELLNAPATVCGPKLSTDLIKNQC |
| | | VNFNFNGLTGTGVLTPSSKRFQPFQQFGRDVSDFTD |
| | | SVRDPKTSEILDISPCSFGGVSVITPGTNASSEVAVLYQDVNCT |
| | | DVSTAIHADQLTPAWRIYSTGNNVFQTQAGCLIGAE |
| | | HVDTSYECDIPIGAGICASYHTVSLLRSTSQKSIVAYTMSLGAD |
| | | SSIAYSNNTIAIPTNFSISITTEVMPVSMAKTSVDC |
| | | NMYICGDSTECANLLLQYGSFCTQLNRALSGIAAEQDRNTREV |
| | | FAQVKQMYKTPTLKYFGGFNFSQILPDPLKPTKRSFI |
| | | EDLLFNKVTLADAGFMKQYGECLGDINARDLICAQKFNGLTVL |
| | | PPLLTDDMIAAYTAALVSGTATAGWTFGAGAALQIPF |
| | | AMQMAYRFNGIGVTQNVLYENQKQIANQFNKAISQIQESLTTT |
| | | STALGKLQDVVNQNAQALNTLVKQLSSNFGAISSVLN |
| | | DILSRLDKVEAEVQIDRLITGRLQSLQTYVTQQLIRAAEIRASAN |
| | | LAATKMSECVLGQSKRVDFCGKGYHLMSFPQAAPH |
| | | GVVFLHVTYVPSQERNFTTAPAICHEGKAYFPREGVFVFNGTS |
| | | WFITQRNFFSPQIITTDNTFVSGNCDVVIGIINNTVY |
| | | DPLQPELDSFKEELDKYFKNHTSPDVDLGDISGINASVVNIQKE |
| | | IDRLNEVAKNLNESLIDLQELGKYEQYIKWPWYVWL |
| | | GFIAGLIVIVMVTILLCCMTSCCSCLKGACSCGSCCKFDEDDSE |
| | | PVLKGVKLHYT |
| 117 | SARS-related | MFIFLLFLTLTSGSDLDRCTTFDDVQAPNYTQHTSSMRGVYYP |
| | coronavirus | DEIFRSDTLYLTQDLFLPFYSNVTGFHTINHTFGNPV |
| | Spike | IPFKDGIYFAATEKSNVVRGWVFGSTMNNKSQSVIIINNSTNVV |
| | glycoprotein | IRACNFELCDNPFIAVSKPMGTQTHTMIFDNAFNCT |
| | (GenBank: | FEYISDAFSLDVSEKSGNFKHLREFVFKNKDGFLYVYKGYQPI |
| | ABD72985) | DVVRDLPSGFNTLKPIFKLPLGINITNFRAILTAFSP |
| | | AQDIWGTSAAAYFVGYLKPTTFMLKYDENGTITDAVDCSQNPL |
| | | AELKCSVKSFEIDKGIYQTSNFRVVPSGDVVRFPNIT |
| | | NLCPFGEVFNATKFPSVYAWERKKISNCVADYSVLYNSTFFST |
| | | FKCYGVSATKLNDLCFSNVYADSFVVKGDDVRQIAPG |
| | | QTGVIADYNYKLPDDFMGCVLAWNTRNIDATSTGNYNYKYRY |
| | | LRHGKLRPFERDISNVPFSPDGKPCTPPALNCYWPLND |
| | | YGFYTTTGIGYQPYRVVVLSFELLNAPATVCGPKLSTDLIKNQC |
| | | VNFNFNGLTGTGVLTPSSKRFQPFQQFGRDVSDFTD |
| | | SVRDPKTSEILDISPCSFGGVSVITPGTNASSEVAVLYQDVNCT |
| | | DVSTAIHADQLTPAWRIYSTGNNVFQTQAGCLIGAE |
| | | HVDTSYECDIPIGAGICASYHTVSLLRSTSQKSIVAYTMSLGAD |
| | | SSIAYSNNTIAIPTNFSISITTEVMPVSMAKTSVDC |
| | | NMYICGDSTECANLLLQYGSFCTQLNRALSGIAAEQDRNTREV |
| | | FAQVKQMYKTPTLKYFGGFNFSQILPDPLKPTKRSFI |
| | | EDLLFNKVTLADAGFMKQYGECLGDINARDLICAQKFNGLTVL |
| | | PPLLTDDMIAAYTAALVSGTATAGWTFGAGAALQIPF |
| | | AMQMAYRFNGIGVTQNVLYENQKQIANQFNKAISQIQESLTTT |
| | | STALGKLQDVVNQNAQALNTLVKQLSSNFGAISSVLN |
| | | DILSRLDKVEAEVQIDRLITGRLQSLQTYVTQQLIRAAEIRASAN |
| | | LAATKMSECVLGQSKRVDFCGKGYHLMSFPQAAPH |
| | | GVVFLHVTYVPSQERNFTTAPAICHEGKAYFPREGVFVFNGTS |
| | | WFITQRNFFSPQIITTDNTFVSGNCDVVIGIINNTVY |
| | | DPLQPELDSFKEELDKYFKNHTSPDVDLGDISGINASVVNIQKE |
| | | IDRLNEVAKNLNESLIDLQELGKYEQYIKWPWYVWL |
| | | GFIAGLIAIVMVTILLCCMTSCCSCLKGACSCGSCCKFDEDDSE |
| | | PVLKGVKLHYT |
| 118 | SARS-related | MFIFLLFLTLTRGSDLDRCTTFDDVQAPNYTQHTSSMRGVYYP |
| | coronavirus | DEIFRSDTLYLTQDLFLPFYSNVTGFHTINHTFGNPV |
| | Spike | IPFKDGIYFAATEKSNVVRGWVFGSTMNNKSQSVIIINNSTNVV |
| | glycoprotein | IRACNFELCDNPFIAVSKPMGTQTHTMIFDNAFNCT |
| | (GenBank: | FEYISDAFSLDVSEKSGNFKHLREFVFKNKDGFLYVYKGYQPI |
| | ABD72977) | DVVRDLPSGFNTLKPIFKLPLGINITNFRAILTAFSP |
| | | AQDIWGTSAAAYFVGYLKPTTFMLKYDENGTITDAVDCSQNPL |
| | | AELKCSVKSFEIDKGIYQTSNFRVVPSGDVVRFPNIT |
| | | NLCPFGEVFNATKFPSVYAWERKKISNCVADYSVLYNSTFFST |
| | | FKCYGVSATKLNDLCFSNVYADSFVVKGDDVRQIAPG |
| | | QTGVIADYNYKLPDDFMGCVLAWNTRNIDATSTGNYNYKYRY |
| | | LRHGKLRPFERDISNVPFSPDGKPCTPPALNCYWPLND |
| | | YGFYTTTGIGYQPYRVVVLSFELLNAPATVCGPKLSTDLIKNQC |
| | | VNFNFNGLTGTGVLTPSSKRFQPFQQFGRDVSDFTD |
| | | SVRDPKTSEILDISPCSFGGVSVITPGTNASSEVAVLYQDVNCT |
| | | DVSTAIHADQLTPAWRIYSTGNNVFQTQAGCLIGAE |
| | | HVDTSYECDIPIGAGICASYHTVSLLRSTSQKSIVAYTMSLGAD |
| | | SSIAYSNNTIAIPTNFSISITTEVMPVSMAKTSVDC |
| | | NMYICGDSTECANLLLQYGSFCTQLNRALSGIAAEQDRNTREV |
| | | FAQVKQMYKTPTLKYFGGFNFSQILPDPLKPTKRSFI |
| | | EDLLFNKVTLADAGFMKQYGECLGDINARDLICAQKFNGLTVL |
| | | PPLLTDDMIAAYTAALVSGTATAGWTFGAGAALQIPF |
| | | AMQMAYRFNGIGVTQNVLYENQKQIANQFNKAISQIQESLTTT |
| | | STALGKLQDVVNQNAQALNTLVKQLSSNFGAISSVLN |
| | | DILSRLDKVEAEVQIDRLITGRLQSLQTYVTQQLIRAAEIRASAN |
| | | LAATKMSECVLGQSKRVDFCGKGYHLMSFPQAAPH |
| | | GVVFLHVTYVPSQERNFTTAPAICHEGKAYFPREGVFVFNGTS |
| | | WFITQRNFFSPQIITTDNTFVSGNCDVVIGIINNTVY |
| | | DPLQPELDSFKEELDKYFKNHTSPDVDLGDISGINASVVNIQKE |
| | | IDRLNEVAKNLNESLIDLQELGKYEQYIKWPWYVWL |
| | | GFIAGLIAIVMVTILLCCMTSCCSCLKGACSCGSCCKFDEDDSE |
| | | PVLKGVKLHYT |
| 119 | SARS-related | MFIFLLFLTLTRGSDLDRCTTFDDVQAPNYTQHTSSMRGVYYP |
| | coronavirus | DEIFRSDTLYLTQDLFLPFYSNVTGFHTINHTFGNPV |
| | Spike | IPFKDGIYFAATEKSNVVRGWVFGSTMNNKSQSVIIINNSTNVV |
| | glycoprotein | IRACNFELCDNPFFAVSKPMGTQTHTMIFDNAFNCT |
| | (GenBank: | FEYISDAFSLDVSEKSGNFKHLREFVFKNKDGFLYVYKGYQPI |
| | ABD72979) | DVVRDLPSGFNTLKPIFKLPLGINITNFRAILTAFSP |
| | | AQDIWGTSAAAYFVGYLKPTTFMLKYDENGTITDAVDCSQNPL |
| | | AELKCSVKSFEIDKGIYQTSNFRVVPSGDVVRFPNIT |
| | | NLCPFGEVFNATKFPSVYAWERKKISNCVADYSVLYNSTFFST |
| | | FKCYGVSATKLNDLCFSNVYADSFVVKGDDVRQIAPG |
| | | QTGVIADYNYKLPDDFMGCVLAWNTRNIDATSTGNYNYKYRY |
| | | LRHGKLRPFERDISNVPFSPDGKPCTPPALNCYWPLND |
| | | YGFYTTTGIGYQPYRVVVLSFELLNAPATVCGPKLSTDLIKNQC |
| | | VNFNFNGLTGTGVLTPSSKRFQPFQQFGRDVSDFTD |
| | | SVRDPKTSEILDISPCSFGGVSVITPGTNASSEVAVLYQDVNCT |
| | | DVSTAIHADQLTPAWRIYSTGNNVFQTQAGCLIGAE |
| | | HVDTSYECDIPIGAGICASYHTVSLLRSTSQKSIVAYTMSLGAD |
| | | SSIAYSNNTIAIPTNFSISITTEVMPVSMAKTSVDC |
| | | NMYICGDSTECANLLLQYGSFCTQLNRALSGIAAEQDRNTREV |
| | | FAQVKQMYKTPTLKYFGGFNFSQILPDPLKPTKRSFI |
| | | EDLLFNKVTLADAGFMKQYGECLGDINARDLICAQKFNGLTVL |
| | | PPLLTDDMIAAYTAALVSGTATAGWTFGAGAALQIPF |
| | | AMQMAYRFNGIGVTQNVLYENQKQIANQFNKAISQIQESLTTT |
| | | STALGKLQDVVNQNAQALNTLVKQLSSNFGAISSVLN |
| | | DILSRLDKVEAEVQIDRLITGRLQSLQTYVTQQLIRAAEIRASAN |
| | | LAATKMSECVLGQSKRVDFCGKGYHLMSFPQAAPH |
| | | GVVFLHVTYVPSQERNFTTAPAICHEGKAYFPREGVFVFNGTS |
| | | WFITQRNFFSPQIITTDNTFVSGNCDVVIGIINNTVY |
| | | DPLQPELDSFKEELDKYFKNHTSPDVDLGDISGINASVVNIQKE |
| | | IDRLNEVAKNLNESLIDLQELGKYEQYIKWPWYVWL |
| | | GFIAGLIAIVMVTILLCCMTSCCSCLKGACSCGSCCKFDEDDSE |
| | | PVLKGVKLHYT |
| 120 | SARS-related | MFIFLLFLTLTRGSDLDRCTTFDDVQAPNYTQHTSSMRGVYYP |
| | coronavirus | DEIFRSDTLYLTQDLFLPFYSNVTGFHTINHTFGNPV |
| | Spike | IPFKDGIYFAATEKSNVVRGWVFGSTMNNKSQSVIIINNSTNVV |
| | glycoprotein | IRACNFELCDNPFFAVSKPMGTQTHTMIFDNAFNCT |
| | (GenBank: | FEYISDAFSLDVSEKSGNFKHLREFVFKNKDGFLYVYKGYQPI |
| | ABD72995) | DVVRDLPSGFNTLKPIFKLPLGINITNFRAILTAFSP |
| | | AQDIWGTSAAAYFVGYLKPTTFMLKYDENGTITDAVDCSQNPL |
| | | AELKCSVKSFEIDKGIYQTSNFRVVPSGDVVRFPNIT |
| | | NLCPFGEVFNATKFPSVYAWERKKISNCVVDYSVLYNSTFFST |
| | | FKCYGVSATKLNDLCFSNVYADSFVVKGDDVRQIAPG |
| | | QTGVIADYNYKLPDDFMGCVLAWNTRNIDATSTGNYNYKYRY |
| | | LRHGKLRPFERDISNVPFSPDGKPCTPPALNCYWPLND |
| | | YGFYTTTGIGYQPYRVVVLSFELLNAPATVCGPKLSTDLIKNQC |
| | | VNFNFNGLTGTGVLTPSSKRFQPFQQFGRDVSDFTD |
| | | SVRDPKTSEILDISPCSFGGVSVITPGTNASSEVAVLYQDVNCT |
| | | DVSTAIHADQLTPAWRIYSTGNNVFQTQAGCLIGAE |
| | | HVDTSYECDIPIGAGICASYHTVSLLRSTSQKSIVAYTMSLGAD |
| | | SSIAYSNNTIAIPTNFSISITTEVMPVSMAKTSVDC |
| | | NMYICGDSTECANLLLQYGSFCTQLNRALSGIAAEQDRNTREV |
| | | FAQVKQMYKTPTLKYFGGFNFSQILPDPLKPTKRSFI |
| | | EDLLFNKVTLADAGFMKQYGECLGDINARDLICAQKFNGLTVL |
| | | PPLLTDDMIAAYTAALVSGTATAGWTFGAGAALQIPF |
| | | AMQMAYRFNGIGVTQNVLYENQKQIANQFNKAISQIQESLTTT |
| | | STALGKLQDVVNQNAQALNTLVKQLSSNFGAISSVLN |
| | | DILSRLDKVEAEVQIDRLITGRLQSLQTYVTQQLIRAAEIRASAN |
| | | LAATKMSECVLGQSKRVDFCGKGYHLMSFPQAAPH |
| | | GVVFLHVTYVPSQERNFTTAPAICHEGKAYFPREGVFVFNGTS |
| | | WFITQRNFFSPQIITTDNTFVSGNCDVVIGIINNTVY |
| | | DPLQPELDSFKEELDKYFKNHTSPDVDLGDISGINASVVNIQKE |
| | | IDRLNEVAKNLNESLIDLQELGKYEQYIKWPWYVWL |
| | | GFIAGLIAIVMVTILLCCMTSCCSCLKGACSCGSCCKFDEDDSE |
| | | PVLKGVKLHYT |
| 121 | SARS | MFIFLLFLTLTSGSDLDRCTTFDDVQAPNYTQHTSSMRGVYYP |
| | coronavirus | DEIFRSDTLYLTQDLFLPFYSNVTGFHTINHTFGNPV |
| | BJ302 | IPFKDGIYFAATEKSNVVRGWVFGSTMNNKSQSVIIINNSTNVV |
| | Spike | IRACNFELCDNPFFAVSKPMGTQTHTMIFDNAFNCT |
| | glycoprotein | FEYISDAFSLDVSEKSGNFKHLREFVFKNKDGFLYVYKGYQPI |
| | (GenBank: | DVVRDLPSGFNTLKPIFKLPLGINITNFRAILTAFSP |
| | AAR07630) | AQDTWGTSAAAYFVGYLKPTTFMLKYDENGTITDAVDCSQNP |
| | | LAELKCSVKSFEIDKGIYQTSNFRVVPSGDVVRFPNIT |
| | | NLCPFGEVFNATKFPSVYAWERKKISNCVADYSVLYNSTFFST |
| | | FKCYGVSATKLNDLCFSNVYADSFVVKGDDVRQIAPG |
| | | QTGVIADYNYKLPDDFMGCVLAWNTRNIDATSTGNYNYKYRY |
| | | LRHGKLRPFERDISNVPFSPDGKPCTPPALNCYWPLND |
| | | YGFYTTTGIGYQPYRVVVLSFELLNAPATVCGPKLSTDLIKNQC |
| | | VNFNFNGLTGTGVLTPSSKRFQPFQQFGRDVSDFTD |
| | | SVRDPKTSEILDISPCSFGGVSVITPGTNASSEVAVLYQDVNCT |
| | | DVSTAIHADQLTPAWRIYSTGNNVFQTQAGCLIGAE |
| | | HVDTSYECDIPIGAGICASYHTVSLLRSTSQKSIVAYTMSLGAD |
| | | SSIAYSNNTIAIPTNFSISITTEVMPVSMAKTSVDC |
| | | NMYICGDSTECANLLLQYGSFCTQLNRALSGIAAEQDRNTREV |
| | | FAQVKQMYKTPTLKYFGGFNFSQILPDPLKPTKRSFI |
| | | EDLLFNKVTLADAGFMKQYGECLGDINARDLICAQKFNGLTVL |
| | | PPLLTDDMIAAYTAALVSGTATAGWTFGAGAALQIPF |
| | | AMQMAYRFNGIGVTQNVLYENQKQIANQFNKAISQIQESLTTT |
| | | STALGKLQDVVNQNAQALNTLVKQLSSNFGAISSVLN |
| | | DILSRLDKVEAEVQIDRLITGRLQSLQTYVTQQLIRAAEIRASAN |
| | | LAATKMSECVLGQSKRVDFCGKGYHLMSFPQAAPH |
| | | GVVFLHVTYVPSQERNFTTAPAICHEGKAYFPREGVFVFNGTS |
| | | WFITQRNFFSPQIITTDNTFVSGNCDVVIGIINNTVY |
| | | DPLQPELDSFKEELDKYFKNHTSPDVDLGDISGINASVVNIQKE |
| | | IDRLNEVAKNLNESLIDLQELGKYEQYIKWPWYVWL |
| | | GFIAGLIAIVMVTILLCCMTSCCSCLKGACSCGSCCKFDEDDSE |
| | | PVLKGVKLHYT |
| 122 | SARS | MFIFLLFLTLTSGSDLDRCTTFDDVQAPNYTQHTSSMRGVYYP |
| | coronavirus | DEIFRSDTLYLTQDLFLPFYSNVTGFHTINHTFGNPV |
| | TJF | IPFKDGIYFAATEKSNVVRGWVFGSTMNNKSQSVIIINNSTNVV |
| | Spike | IRACNFELCDNPFFAVSKPMGTQTHTMIFDNAFNCT |
| | glycoprotein | FEYISDAFSLDVSEKSGNFKHLREFVFKNKDGFLYVYKGYQPI |
| | (GenBank: | DVVRDLPSGFNTLKPIFKLPLGINITNFRAILTAFSP |
| | AAT76147) | AQDTWGTSAAAYFVGYLKPTTFMLKYDENGTITDAVDCSQNP |
| | | LAELKCSVKSFEIDKGIYQTSNFRVVPSGDVVRFPNIT |
| | | NLCPFGEVFNATKFPSVYAWERKKISNCVADYSVLYNSTFFST |
| | | FKCYGVSATKLNDLCFSNVYADSFVVKGDDVRQIAPG |
| | | QTGVIADYNYKLPDDFMGCVLAWNTRNIDATSTGNYNYKYRY |
| | | LRHGKLRPFERDISNVPFSPDGKPCTPPALNCYWPLND |
| | | YGFYTTTGIGYQPYRVVVLSFELLNAPATVCGPKLSTDLIKNQC |
| | | VNFNFNGLTGTGVLTPSSKRFQPFQQFGRDVSDFTD |
| | | SVRDPKTSEILDISPCSFGGVSVITPGTNASSEVAVLYQDVNCT |
| | | DVSTAIHADQLTPAWRIYSTGNNVFQTQAGCLIGAE |
| | | HVDTSYECDIPIGAGICASYHTVSLLRNTSQKSIVAYTMSLGAD |
| | | SSIAYSNNTIAIPTNFSISITTEVMPVSMAKTSVDC |
| | | NMYICGDSTECANLLLQYGSFCTQLNRALSGIAAEQDRNTREV |
| | | FAQVKQMYKTPTLKYFGGFNFSQILPDPLKPTKRSFI |
| | | EDLLFNKVTLADAGFMKQYGECLGDINARDLICAQKFNGLTVL |
| | | PPLLTDDMIAAYTAALVSGTATAGWTFGAGAALQIPF |
| | | AMQMAYRFNGIGVTQNVLYENQKQIANQFNKAISQIQESLTTT |
| | | STALGKLQDVVNQNAQALNTLVKQLSSNFGAISSVLN |
| | | DILSRLDKVEAEVQIDRLITGRLQSLQTYVTQQLIRAAEIRASAN |
| | | LAATKMSECVLGQSKRVDFCGKGYHLMSFPQAAPH |
| | | GVVFLHVTYVPSQERNFTTAPAICHEGKAYFPREGVFVFNGTS |
| | | WFITQRNFFSPQIITTDNTFVSGKCDVVIGIINNTVY |
| | | DPLQPELDSFKEELDKYFKNHTSPDVDLGDISGINASVVNIQKE |
| | | IDRLNEVAKNLNESLIDLQELGKYEQYIKWPWYVWL |
| | | GFIAGLIAIVMVTILLCCMTSCCSCLKGACSCGSCCKFDEDDSE |
| | | PVLKGVKLHYT |
| 123 | SARS | MFIFLLFLTLTSGSDLDRCTTFDDVQAPNYTQHTSSMRGVYYP |
| | coronavirus | DEIFRSDTLYLTQDLFLPFYSNVTGFHTINHTFGNPV |
| | NS-1 | IPFKDGIYFAATEKSNVVRGWVFGSTMNNKSQSVIIINNSTNVV |
| | Spike | IRACNFELCDNPFFAVSKPMGTQTHTMIFDNAFNCT |
| | glycoprotein S | FEYISDAFSLDVSEKSGNFKHLREFVFKNKDGFLYVYKGYQPI |
| | (GenBank: | DVVRDLPSGFNTLKPIFKLPLGINITNFRAILTAFSP |
| | AAR91586) | AQDTWGTSAAAYFVGYLKPTTFMLKYDENGTITDAVDCSQNP |
| | | LAELKCSVKSFEIDKGIYQTSNFRVVPSGDVVRFPNIT |
| | | NLCPFGEVFNATKFPSVYAWERKKISNCVADYSVLYNSTFFST |
| | | FKCYGVSATKLNDLCFSNVYADSFVVKGDDVRQIAPG |
| | | QTGVIADYNYKLPDDFMGCVLAWNTRNIDATSTGNYNYKYRY |
| | | LRHGKLRPFERDISNVPFSPDGKPCTPPALNCYWPLND |
| | | YGFYTTTGIGYQPYRVVVLSFELLNAPATVCGPKLSTDLIKNQC |
| | | VNFNFNGLTGTGVLTPSSKRFQPFQQFGRDVSDFTD |
| | | SVRDPKTSEILDISPCSFGGVSVITPGTNASSEVAVLYQDVNCT |
| | | DVSTAIHADQLTPAWRIYSTGNNVFQTQAGCLIGAE |
| | | HVDTSYECDIPIGAGICASYHTVSLLRSTSQKSIVAYTMSLGAD |
| | | SSIAYSNNTIAIPTNFSISITTEVMPVSMAKTSVDC |
| | | NMYICGDSTECANLLLQYGSFCTQLNRALSGIAAEQDRNTREV |
| | | FAQVKQMYKTPTLKYFGGFNFSQILPDPLKPTKRSFI |
| | | EDLLFNKVTLADAGFMKQYGECLGDINARDLICAQKFNGLTVL |
| | | PPLLTDDMIAAYTAALVSGTATAGWTFGAGAALQIPF |
| | | AMQMAYRFNGIGVTQNVLYENQKQIANQFNKAISQIQESLTTT |
| | | STALGKLQDVVNQNAQALNTLVKQLSSNFGAISSVLN |
| | | DILSRLDKVEAEVQIDRLITGRLQSLQTYVTQQLIRAAEIMASAN |
| | | LAATKMSECVLGQSKRVDFCGKGYHLMSFPQAAPH |
| | | GVVFLHVTYVPSQERNFTTAPAICHEGKAYFPREGVFVFNGTS |
| | | WFITQRNFFSPQIITTDNTFVSGNCDVVIGIINNTVY |
| | | DPLQPELDSFKEELDKYFKNHTSPDVDLGDISGINASVVNIQKE |
| | | IDRLNEVAKNLNESLIDLQELGKYEQYIKWPWYVWL |
| | | GFIAGLIAIVMVTILLCCMTSCCSCLKGACSCGSCCKFDEDDSE |
| | | PVLKGVKLHYT |
| 124 | SARS | MFIFLLFLTLTSGSDLDRCTTFDDVQAPNYTQHTSSMRGVYYP |
| | coronavirus | DEIFRSDTLYLTQDLFLPFYSNVTGFHTINHTFDNPV |
| | BJ01 | IPFKDGIYFAATEKSNVVRGWVFGSTMNNKSQSVIIINNSTNVV |
| | Spike | IRACNFELCDNPFFAVSKPMGTQTHTMIFDNAFNCT |
| | glycoprotein S | FEYISDAFSLDVSEKSGNFKHLREFVFKNKDGFLYVYKGYQPI |
| | (GenBank: | DVVRDLPSGFNTLKPIFKLPLGINITNFRAILTAFSP |
| | AAP30030) | AQDTWGTSAAAYFVGYLKPTTFMLKYDENGTITDAVDCSQNP |
| | | LAELKCSVKSFEIDKGIYQTSNFRVVPSGDVVRFPNIT |
| | | NLCPFGEVFNATKFPSVYAWERKKISNCVADYSVLYNSTFFST |
| | | FKCYGVSATKLNDLCFSNVYADSFVVKGDDVRQIAPG |
| | | QTGVIADYNYKLPDDFMGCVLAWNTRNIDATSTGNYNYKYRY |
| | | LRHGKLRPFERDISNVPFSPDGKPCTPPALNCYWPLND |
| | | YGFYTTTGIGYQPYRVVVLSFELLNAPATVCGPKLSTDLIKNQC |
| | | VNFNFNGLTGTGVLTPSSKRFQPFQQFGRDVSDFTD |
| | | SVRDPKTSEILDISPCSFGGVSVITPGTNASSEVAVLYQDVNCT |
| | | DVSTAIHADQLTPAWRIYSTGNNVFQTQAGCLIGAE |
| | | HVDTSYECDIPIGAGICASYHTVSLLRSTSQKSIVAYTMSLGAD |
| | | SSIAYSNNTIAIPTNFSISITTEVMPVSMAKTSVDC |
| | | NMYICGDSTECANLLLQYGSFCTQLNRALSGIAAEQDRNTREV |
| | | FAQVKQMYKTPTLKYFGGFNFSQILPDPLKPTKRSFI |
| | | EDLLFNKVTLADAGFMKQYGECLGDINARDLICAQKFNGLTVL |
| | | PPLLTDDMIAAYTAALVSGTATAGWTFGAGAALQIPF |
| | | AMQMAYRFNGIGVTQNVLYENQKQIANQFNKAISQIQESLTTT |
| | | STALGKLQDVVNQNAQALNTLVKQLSSNFGAISSVLN |
| | | DILSRLDKVEAEVQIDRLITGRLQSLQTYVTQQLIRAAEIRASAN |
| | | LAATKMSECVLGQSKRVDFCGKGYHLMSFPQAAPH |
| | | GVVFLHVTYVPSQERNFTTAPAICHEGKAYFPREGVFVFNGTS |
| | | WFITQRNFFSPQIITTDNTFVSGNCDVVIGIINNTVY |
| | | DPLQPELDSFKEELDKYFKNHTSPDVDLGDISGINASVVNIQKE |
| | | IDRLNEVAKNLNESLIDLQELGKYEQYIKWPWYVWL |
| | | GFIAGLIAIVMVTILLCCMTSCCSCLKGACSCGSCCKFDEDDSE |
| | | PVLKGVKLHYT |
| 125 | SARS | MAIFLLFLTLTSGSDLDRCTTFDDVQAPNYTQHTSSMRGVYYP |
| | coronavirus | DEIFRSDTLYLTQDLFLPFYSNVTGFHTINHTFDNPV |
| | HHS-2004 | IPFKDGIYFAATEKSNVVRGWVFGSTMNNKSQSVIIINNSTNVV |
| | Spike protein | IRACNFELCDNPFFAVSKPMGTQTHTMIFDNAFNCT |
| | (GenBank: | FEYISDAFSLDVSEKSGNFKHLREFVFKNKDGFLYVYKGYQPI |
| | AAT74874) | DVVRDLPSGFNTLKPIFKLPLGINITNFRAILTAFSP |
| | | AQDTWGTSAAAYFVGYLKPTTFMLKYDENGTITDAVDCSQNP |
| | | LAELKCSVKSFEIDKGIYQTSNFRVVPSGDVVRFPNIT |
| | | NLCPFGEVFNATKFPSVYAWERKKISNCVADYSVLYNSTFFST |
| | | FKCYGVSATKLNDLCFSNVYADSFVVKGDDVRQIAPG |
| | | QTGVIADYNYKLPDDFMGCVLAWNTRNIDATSTGNYNYKYRY |
| | | LKHGKLRPFERDISNVPFSPDGKPCTPPALNCYWPLND |
| | | YGFYTTTGIGYQPYRVVVLSFELLNAPATVCGPKLSTDLIKNQC |
| | | VNFNFNGLTGTGVLTPSSKRFQPFQQFGRDVSDFTD |
| | | SVRDPKTSEILDISPCSFGGVSVITPGTNASSEVAVLYQDVNCT |
| | | DVSTAIHADQLTPAWRIYSTGNNVFQTQAGCLIGAE |
| | | HVDTSYECDIPIGAGICASYHTVSLLRSTSQKSIVAYTMSLGAD |
| | | SSIAYSNNTIAIPTNFSISITTEVMPVSMAKTSVDC |
| | | NMYICGDSTECANLLLQYGSFCTQLNRALSGIAAEQDRNTREV |
| | | FAQVKQMYKTPTLKYFGGFNFSQILPDPLKPTKRSFI |
| | | EDLLFNKVTLADAGFMKQYGECLGDINARDLICAQKFNGLTVL |
| | | PPLLTDDMIAAYTAALVSGTATAGWTFGAGAALQIPF |
| | | AMQMAYRFNGIGVTQNVLYENQKQIANQFNKAISQIQESLTTT |
| | | STALGKLQDVVNQNAQALNTLVKQLSSNFGAISSVLN |
| | | DVLSRLDKVEAEVQIDRLITGRLQSLQTYVTQQLIRAAEIRASA |
| | | NLAATKMSECVLGQSKRVDFCGKGYHLMSFPQAAPH |
| | | GVVFLHVTYVPSQERNFTTAPAICHEGKAYFPREGVFVFNGTS |
| | | WFITQRNFFSPQIITTDNTFVSGNCDVVIGIINNTVY |
| | | DPLQPELDSFKEELDKYFKNHTSPDVDLGDISGINASVVNIQKE |
| | | IDRLNEVAKNLNESLIDLQELGKYEQYIKWPWYVWL |
| | | GFIAGLIAIVMVTILLCCMTSCCSCLKGACSCGSCCKFDEDDSE |
| | | PVLKGVKLHYT |
| 126 | SARS | MFIFLLFLTLTSGSDLDRCTTFDDVQAPNYTQHTSSMRGVYYP |
| | coronavirus | DEIFRSDTLYLTQDLFLPFYSNVTGFHTINHTFDNPV |
| | WH20 | IPFKDGIYFAATEKSNVVRGWVFGSTMNNKSQSVIIINNSTNVV |
| | Spike | IRACNFELCDNPFFAVSKPMGTQTHTMIFDNAFNCT |
| | glycoprotein S | FEYISDAFSLDVSEKSGNFKHLREFVFKNKDGFLYVYKGYQPI |
| | (GenBank: | DVVRDLPSGFNTLKPIFKLPLGINITNFRAILTAFSP |
| | AAX16192) | AQDTWGTSAAAYFVGYLKPTTFMLKYDENGTITDAVDCSQNP |
| | | LAELKCSVKSFEIDKGIYQTSNFRVVPSGDVVRFPNIT |
| | | NLCPFGEVFNATKFPSVYAWERKKISNCVADYSVLYNSTFFST |
| | | FKCYGVSATKLNDLCFSNVYADSFVVKGDDVRQIAPG |
| | | QTGVIADYNYKLPDDFMGCVLAWNTRNIDATSTGNYNYKYRY |
| | | LRHGKLRPFERDISNVPFSPDGKPCTPPALNCYWPLND |
| | | YGFYTTTGIGYQPYRVVVLSFELLNAPATVCGPKLSTDLIKNQC |
| | | VNFNFNGLTGTGVLTPSSKRFQPFQQFGRDVSDFTD |
| | | SVRDPKTSEILDISPCSFGGVSVITPGTNASSEVAVLYQDVNCT |
| | | DVSTAIHADQLTPAWRIYSTGNNVFQTQAGCLIGAE |
| | | HVDTSYECDIPIGAGICASYHTVSLLRSTSQKSIVAYTMSLGAD |
| | | SSIAYSNNTIAIPTNFSISITTEVMPVSMAKTSVDC |
| | | NMYICGDSTECANLLLQYGSFCTQLNRALSGIAAEQDRNTREV |
| | | FAQVKQMYKTPTLKYFGGFNFSQILPDPLKPTKRSFI |
| | | EDLLFNKVTLADAGFMKQYGECLGDINARDLICAQKFNGLTVL |
| | | PPLLTDDMIAAYTAALVSGTATAGWTFGAGAALQIPF |
| | | AMQMAYRFNGIGVTQNVLYENQKQIANQFNKAISQIQESLTTT |
| | | STALGKLQDVVNQNAQALNTLVKQLSSNFGAISSVLN |
| | | DILSRLDKVEAEVQIDRLITGRLQSLQTYVTQQLIRAAEIRASAN |
| | | LAATKMSECVLGQSKRVDFCGKGYHLMSFPQAAPH |
| | | GVVFLHVTYVPSQERNFTTAPAICHEGKAYFPREGVFVFNGTS |
| | | WFITQRNFFSPQIITTDNTFVSGNCDVVIGIINNTVY |
| | | DPLQPELDSFKEELDKYFKNHTSPDVDLGDISGINASVVNIQKE |
| | | IDRLNEVAKNLNESLIDLQELGKYEQYIKWPWYVWL |
| | | GFIAGLMAIVMVTILLCCMTSCCSCLKGACSCGSCCKFDEDDS |
| | | EPVLKGVKLHYT |
| 127 | SARS | MFIFLLFFTLTSGSDLDRCTTFDDVQAPNYTQHTSSMRGVYYP |
| | coronavirus | DEIFRSDTLYLTQDLFLPFYSNVTGFHTINHTFGNPV |
| | BJ302 | IPFKDGIYFAATEKSNVVRGWVFGSTMNNKSQSVIIINNSTNVV |
| | Spike | IRACNFELCDNPFFAVSKPMGTQTHTMIFDNAFNCT |
| | glycoprotein | FEYISDAFSLDVSEKSGNFKHLREFVFKNKDGFLYVYKGYQPI |
| | (GenBank: | DVVRDLPSGFNTLKPIFKLPLGINITNFRAILTAFSP |
| | AAR07624) | AQDTWGTSAAAYFVGYLKPTTFMLKYDENGTITDAVDCSQNP |
| | | LAELKCSVKSFEIDKGIYQTSNFRVVPSGDVVRFPNIT |
| | | NLCPFGEVFNATKFPSVYAWERKKISNCVADYSVLYNSTFFST |
| | | FKCYGVSATKLNDLCFSNVYADSFVVKGDDVRQIAPG |
| | | QTGVIADYNYKLPDDFMGCVLAWNTRNIDATSTGNYNYKYRY |
| | | LRHGKLRPFERDISNVPFSPDGKPCTPPALNCYWPLND |
| | | YGFYTTTGIGYQPYRVVVLSFELLNAPATVCGPKLSTDLIKNQC |
| | | VNFNFNGLTGTGVLTPSSKRFQPFQQFGRDVSDFTD |
| | | SVRDPKTSEILDISPCSFGGVSVITPGTNASSEVAVLYQDVNCT |
| | | DVSTAIHADQLTPAWRIYSTGNNVFQTQAGCLIGAE |
| | | HVDTSYECDIPIGAGICASYHTVSLLRSTSQKSIVAYTMSLGAD |
| | | SSIAYSNNTIAIPTNFSISITTEVMPVSMAKTSVDC |
| | | NMYICGDSTECANLLLQYGSFCTQLNRALSGIAAEQDRNTREV |
| | | FAQVKQMYKTPTLKYFGGFNFSQILPDPLKPTKRSFI |
| | | EDLLFNKVTLADAGFMKQYGECLGDINARDLICAQKFNGLTVL |
| | | PPLLTDDMIAAYTAALVSGTATAGWTFGAGAALQIPF |
| | | AMQMAYRFNGIGVTQNVLYENQKQIANQFNKAISQIQESLTTT |
| | | STALGKLQDVVNQNAQALNTLVKQLSSNFGAISSVLN |
| | | DILSRLDKVEAEVQIDRLITGRLQSLQTYVTQQLIRAAEIRASAN |
| | | LAATKMSECVLGQSKRVGFCGKGYHLMSFPQAAPH |
| | | GVVFLHVTYVPSQERNFTTAPAICHEGKAYFPREGVFVFNGTS |
| | | WFITQRNFFSPQIITTDNTFVSGNCDVVIGIINNTVY |
| | | DPLQPELDSFKEELDKYFKNHTSPDVDLGDISGINASVVNIQKE |
| | | IDRLNEVAKNLNESLIDLQELGKYEQYIKWPWYVWL |
| | | GFIAGLIAIVMVTILLCCMTSCCSCLKGACSCGSCCKFDEDDSE |
| | | PVLKGVKLHYT |
| 128 | SARS | MFIFLLFFTLTSGSDLDRCTTFDDVQAPNYTQHTSSMRGVYYP |
| | coronavirus | DEIFRSDTLYLTQDLFLPFYSNVTGFHTINHTFGNPV |
| | BJ302 | IPFKDGIYFAATEKSNVVRGWVFGSTMNNKSQSVIIINNSTNVV |
| | Spike | IRACNFELCDNPFFAVSKPMGTQTHTMIFDNAFNCT |
| | glycoprotein | FEYISDAFSLDVSEKSGNFKHLREFVFKNKDGFLYVYKGYQPI |
| | (GenBank: | DVVRDLPSGFNTLKPIFKLPLGINITNFRAILTAFSP |
| | AAR07626) | AQDTWGTSAAAYFVGYLKPTTFMLKYDENGTITDAVDCSQNP |
| | | LAELKCSVKSFEIDKGIYQTSNFRVVPSGDVVRFPNIT |
| | | NLCPFGEVFNATKFPSVYAWERKKISNCVADYSVLYNSTFFST |
| | | FKCYGVSATKLNDLCFSNVYADSFVVKGDDVRQIAPG |
| | | QTGVIADYNYKLPDDFMGCVLAWNTRNIDATSTGNYNYKYRY |
| | | LRHGKLRPFERDISNVPFSPDGKPCTPPALNCYWPLSD |
| | | YGFYTTTGIGYQPYRVVVLSFELLNAPATVCGPKLSTDLIKNQC |
| | | VNFNFNGLTGTGVLTPSSKRFQPFQQFGRDVSDFTD |
| | | SVRDPKTSEILDISPRSFGGVSVITPGTNASSEVAVLYQDVNCT |
| | | DVSTAIHADQLTPAWRIYSTGNNVFQTQAGCLIGAE |
| | | HVDTSYECDIPIGAGICASYHTVSLLRSTSQKSIVAYTMSLGAD |
| | | SSIAYSNNTIAIPTNFSISITTEVMPVSMAKTSVDC |
| | | NMYICGDSTECANLLLQYGSFCTQLNRALSGIAAEQDRNTREV |
| | | FAQVKQMYKTPTLKYFGGFNFSQILPDPLKPTKRSFI |
| | | EDLLFNKVTLADAGFMKQYGECLGDINARDLICAQKFNGLTVL |
| | | PPLLTDDMIAAYTAALVSGTATAGWTFGAGAALQIPF |
| | | AMQMAYRFNGIGVTQNVLYENQKQIANQFNKAISQIQESLTTT |
| | | STALGKLQDVVNQNAQALNTLVKQLSSNFGAISSVLN |
| | | DILSRLDKVEAEVQIDRLITGRLQSLQTYVTQQLIRAAEIRASAN |
| | | LAATKMSECVLGQSKRVGFCGKGYHLMSFPQAAPH |
| | | GVVFLHVTYVPSQERNFTTAPAICHEGKAYFPREGVFVFNGTS |
| | | WFITQRNFFSPQIITTDNTFVSGNCDVVIGIINNTVY |
| | | DPLQPELDSFKEELDKYFKNHTSPDVDLGDISGINASVVNIQKE |
| | | IDRLNEVAKNLNESLIDLQELGKYEQYIKWPWYVWL |
| | | GFIAGLIAIVMVTILLCCMTSCCSCLKGACSCGSCCKFDEDDSE |
| | | PVLKGVKLHYT |
| 129 | SARS | MFIFLLFFTLTSGSDLDRCTTFDDVQAPNYTQHTSSMRGVYYP |
| | coronavirus | DEIFRSDTLYLTQDLFLPFYSNVTGFHTINHTFGNPV |
| | BJ302 | IPFKDGIYFAATEKSNVVRGWVFGSTMNNKSQSVIIINNSTNVV |
| | Spike | IRACNFELCDNPFFAVSKPMGTQTHTMIFDNAFNCT |
| | glycoprotein | FEYISDAFSLDVSEKSGNFKHLREFVFKNKDGFLYVYKGYQPI |
| | (GenBank: | DVVRDLPSGFNTLKPIFKLPLGINITNFRAILTAFSP |
| | AAR07629) | AQDTWGTSAAAYFVGYLKPTTFMLKYDENGTITDAVDCSQNP |
| | | LAELKCSVKSFEIDKGIYQTSNFRVVPSGDVVRFPNIT |
| | | NLCPFGEVFNATKFPSVYAWERKKISNCVADYSVLYNSTFFST |
| | | FKCYGVSATKLNDLCFSNVYADSFVVKGDDVRQIAPG |
| | | QTGVIADYNYKLPDDFMGCVLAWNTRNIDATSTGNYNYKYRY |
| | | LRHGKLRPFERDISNVPFSPDGKPCTPPALNCYWPLSD |
| | | YGFYTTTGIGYQPYRVVVLSFELLNAPATVCGPKLSTDLIKNQC |
| | | VNFNFNGLTGTGVLTPSSKRFQPFQQFGRDVSDFTD |
| | | SVRDPKTSEILDISPCSFGGVSVITPGTNASSEVAVLYQDVNCT |
| | | DVSTAIHADQLTPAWRIYSTGNNVFQTQAGCLIGAE |
| | | HVDTSYECDIPIGAGICASYHTVSLLRSTSQKSIVAYTMSLGAD |
| | | SSIAYSNNTIAIPTNFSISITTEVMPVSMAKTSVDC |
| | | NMYICGDSTECANLLLQYGSFCTQLNRALSGIAAEQDRNTREV |
| | | FAQVKQMYKTPTLKYFGGFNFSQILPDPLKPTKRSFI |
| | | EDLLFNKVTLADAGFMKQYGECLGDINARDLICAQKFNGLTVL |
| | | PPLLTVDMIAAYTAALVSGTATAGWTFGAGAALQIPF |
| | | AMQMAYRFNGIGVTQNVLYENQKQIANQFNKAISQIQESLTTT |
| | | STALGKLQDVVNQNAQALNTLVKQLSSNFGAISSVLN |
| | | DILSRLDKVEAEVQIDRLITGRLQSLQTYVTQQLIRAAEIRASAN |
| | | LAATKMSECVLGQSKRVGFCGKGYHLMSFPQAAPH |
| | | GVVFLHVTYVPSQERNFTTAPAICHEGKAYFPREGVFVFNGTS |
| | | WFITQRNFFSPQIITTDNTFVSGNCDVVIGIINNTVY |
| | | DPLQPELDSFKEELDKYFKNHTSPDVDLGDISGINASVVNIQKE |
| | | IDRLNEVAKNLNESLIDLQELGKYEQYIKWPWYVWL |
| | | GFIAGLIAIVMVTILLCCMTSCCSCLKGACSCGSCCKFDEDDSE |
| | | PVLKGVKLHYT |
| 130 | SARS | MFIFLLFFTLTSGSDLDRCTTFDDVQAPNYTQHTSSMRGVYYP |
| | coronavirus | DEIFRSDTLYLTQDLFLPFYSNVTGFHTINHTFGNPV |
| | BJ302 | IPFKDGIYFAATEKSNVVRGWVFGSTMNNKSQSVIIINNSTNVV |
| | Spike | IRACNFELCDNPFFAVSKPMGTQTHTMIFDNAFNCT |
| | glycoprotein | FEYISDAFSLDVSEKSGNFKHLREFVFKNKDGFLYVYKGYQPI |
| | (GenBank: | DVVRDLPSGFNTLKPIFKLPLGINITNFRAILTAFSP |
| | AAR07625) | AQDTWGTSAAAYFVGYLKPTTFMLKYDENGTITDAVDCSQNP |
| | | LAELKCSVKSFEIDKGIYQTSNFRVVPSGDVVRFPNIT |
| | | NLCPFGEVFNATKFPSVYAWERKKISNCVADYSVLYNSTFFST |
| | | FKCYGVSATKLNDLCFSNVYADSFVVKGDDVRQIAPG |
| | | QTGVIADYNYKLPDDFMGCVLAWNTRNIDATSTGNYNYKYRY |
| | | LRHGKLRPFERDISNVPFSPDGKPCTPPALNCYWPLSD |
| | | YGFYTTTGIGYQPYRVVVLSFELLNAPATVCGPKLSTDLIKNQC |
| | | VNFNFNGLTGTGVLTPSSKRFQPFQQFGRDVSDFTD |
| | | SVRDPKTSEILDISPRSFGGVSVITPGTNASSEVAVLYQDVNCT |
| | | DVSTAIHADQLTPAWRIYSTGNNVFQTQAGCLIGAE |
| | | HVDTSYECDIPIGAGICASYHTVSLLRSTSQKSIVAYTMSLGAD |
| | | SSIAYSNNTIAIPTNFSISITTEVMPVSMAKTSVDC |
| | | NMYICGDSTECANLLLQYGSFCTQLNRALSGIAAEQDRNTREV |
| | | FAQVKQMYKTPTLKYFGGFNFSQILPDPLKPTKRSFI |
| | | EDLLFNKVTLADAGFMKQYGECLGDINARDLICAQKFNGLTVL |
| | | PPLLTVDMIAAYTAALVSGTATAGWTFGAGAALQIPF |
| | | AMQMAYRFNGIGVTQNVLYENQKQIANQFNKAISQIQESLTTT |
| | | STALGKLQDVVNQNAQALNTLVKQLSSNFGAISSVLN |
| | | DILSRLDKVEAEVQIDRLITGRLQSLQTYVTQQLIRAAEIRASAN |
| | | LAATKMSECVLGQSKRVGFCGKGYHLMSFPQAAPH |
| | | GVVFLHVTYVPSQERNFTTAPAICHEGKAYFPREGVFVFNGTS |
| | | WFITQRNFFSPQIITTDNTFVSGNCDVVIGIINNTVY |
| | | DPLQPELDSFKEELDKYFKNHTSPDVDLGDISGINASVVNIQKE |
| | | IDRLNEVAKNLNESLIDLQELGKYEQYIKWPWYVWL |
| | | GFIAGLIAIVMVTILLCCMTSCCSCLKGACSCGSCCKFDEDDSE |
| | | PVLKGVKLHYT |
| 131 | SARS | MFIFLLFLTLTSGSDLDRCTTFDDVQAPNYTQHTSSMRGVYYP |
| | coronavirus | DEIFRSDTLYLTQDLFLPFYSNVTGFHTINHTFGNPV |
| | BJ302 | IPFKDGIYFAATEKSNVVRGWVFGSTMNNKSQSVIIINNSTNVV |
| | Spike | IRACNFELCDNPFFAVSKPMGTQTHTMIFDNAFNCT |
| | glycoprotein | FEYISDAFSLDVSEKSGNFKHLREFVFKNKDGFLYVYKGYQPI |
| | (GenBank: | DVVRDLPSGFNTLKPIFKLPLGINITNFRAILTAFSP |
| | AAR07627) | AQDTWGTSAAAYFVGYLKPTTFMLKYDENGTITDAVDCSQNP |
| | | LAELKCSVKSFEIDKGIYQTSNFRVVPSGDVVRFPNIT |
| | | NLCPFGEVFNATKFPSVYAWERKKISNCVADYSVLYNSTFFST |
| | | FKCYGVSATKLNDLCFSNVYADSFVVKGDDVRQIAPG |
| | | QTGVIADYNYKLPDDFMGCVLAWNTRNIDATSTGNYNYKYRY |
| | | LRHGKLRPFERDISNVPFSPDGKPCTPPALNCYWPLSD |
| | | YGFYTTTGIGYQPYRVVVLSFELLNAPATVCGPKLSTDLIKNQC |
| | | VNFNFNGLTGTGVLTPSSKRFQPFQQFGRDVSDFTD |
| | | SVRDPKTSEILDISPRSFGGVSVITPGTNASSEVAVLYQDVNCT |
| | | DVSTAIHADQLTPAWRIYSTGNNVFQTQAGCLIGAE |
| | | HVDTSYECDIPIGAGICASYHTVSLLRSTSQKSIVAYTMSLGAD |
| | | SSIAYSNNTIAIPTNFSISITTEVMPVSMAKTSVDC |
| | | NMYICGDSTECANLLLQYGSFCTQLNRALSGIAAEQDRNTREV |
| | | FAQVKQMYKTPTLKYFGGFNFSQILPDPLKPTKRSFI |
| | | EDLLFNKVTLADAGFMKQYGECLGDINARDLICAQKFNGLTVL |
| | | PPLLTVDMIAAYTAALVSGTATAGWTFGAGAALQIPF |
| | | AMQMAYRFNGIGVTQNVLYENQKQIANQFNKAISQIQESLTTT |
| | | STALGKLQDVVNQNAQALNTLVKQLSSNFGAISSVLN |
| | | DILSRLDKVEAEVQIDRLITGRLQSLQTYVTQQLIRAAEIRASAN |
| | | LAATKMSECVLGQSKRVGFCGKGYHLMSFPQAAPH |
| | | GVVFLHVTYVPSQERNFTTAPAICHEGKAYFPREGVFVFNGTS |
| | | WFITQRNFFSPQIITTDNTFVSGNCDVVIGIINNTVY |
| | | DPLQPELDSFKEELDKYFKNHTSPDVDLGDISGINASVVNIQKE |
| | | IDRLNEVAKNLNESLIDLQELGKYEQYIKWPWYVWL |
| | | GFIAGLIAIVMVTILLCCMTSCCSCLKGACSCGSCCKFDEDDSE |
| | | PVLKGVKLHYT |
| 132 | SARS | MFIFLLFFTLTSGSDLDRCTTFDDVQAPNYTQHTSSMRGVYYP |
| | coronavirus | DEIFRSDTLYLTQDLFLPFYSNVTGFHTINHTFGNPV |
| | BJ302 | IPFKDGIYFAATEKSNVVRGWVFGSTMNNKSQSVIIINNSTNVV |
| | Spike | IRACIFELCDNPFFAVSKPMGTQTHTMIFDNAFNCT |
| | glycoprotein | FEYISDAFSLDVSEKSGNFKHLREFVFKNKDGFLYVYKGYQPI |
| | (GenBank: | DVVRDLPSGFNTLKPIFKLPLGINITNFRAILTAFSP |
| | AAR07628) | AQDTWGTSAAAYFVGYLKPTTFMLKYDENGTITDAVDCSQNP |
| | | LAELKCSVKSFEIDKGIYQTSNFRVVPSGDVVRFPNIT |
| | | NLCPFGEVFNATKFPSVYAWERKKISNCVADYSVLYNSTFFST |
| | | FKCYGVSATKLNDLCFSNVYADSFVVKGDDVRQIAPG |
| | | QTGVIADYNYKLPDDFMGCVLAWNTRNIDATSTGNYNYKYRY |
| | | LRHGKLRPFERDISNVPFSPDGKPCTPPALNCYWPLSD |
| | | YGFYTTTGIGYQPYRVVVLSFELLNAPATVCGPKLSTDLIKNQC |
| | | VNFNFNGLTGTGVLTPSSKRFQPFQQFGRDVSDFTD |
| | | SVRDPKTSEILDISPRSFGGVSVITPGTNASSEVAVLYQDVNCT |
| | | DVSTAIHADQLTPAWRIYSTGNNVFQTQAGCLIGAE |
| | | HVDTSYECDIPIGAGICASYHTVSLLRSTSQKSIVAYTMSLGAD |
| | | SSIAYSNNTIAIPTNFSISITTEVMPVSMAKTSVDC |
| | | NMYICGDSTECANLLLQYGSFCTQLNRALSGIAAEQDRNTREV |
| | | FAQVKQMYKTPTLKYFGGFNFSQILPDPLKPTKRSFI |
| | | EDLLFNKVTLADAGFMKQYGECLGDINARDLICAQKFNGLTVL |
| | | PPLLTVDMIAAYTAALVSGTATAGWTFGAGAALQIPF |
| | | AMQMAYRFNGIGVTQNVLYENQKQIANQFNKAISQIQESLTTT |
| | | STALGKLQDVVNQNAQALNTLVKQLSSNFGAISSVLN |
| | | DILSRLDKVEAEVQIDRLITGRLQSLQTYVTQQLIRAAEIRASAN |
| | | LAATKMSECVLGQSKRVGFCGKGYHLMSFPQAAPH |
| | | GVVFLHVTYVPSQERNFTTAPAICHEGKAYFPREGVFVFNGTS |
| | | WFITQRNFFSPQIITTDNTFVSGNCDVVIGIINNTVY |
| | | DPLQPELDSFKEELDKYFKNHTSPDVDLGDISGINASVVNIQKE |
| | | IDRLNEVAKNLNESLIDLQELGKYEQYIKWPWYVWL |
| | | GFIAGLIAIVMVTILLCCMTSCCSCLKGACSCGSCCKFDEDDSE |
| | | PVLKGVKLHYT |
| 133 | SARS | MFIFLLFLTLTSGSDLDRCTTFDDVQAPNYTQHTSSMRGVYYP |
| | coronavirus | DEIFRSDTLYLTQDLFLPFYSNVTGFHTINHTFGNPV |
| | BJ302 | IPFKDGIYFAATEKSNVVRGWVFGSTMNNKSQSVIIINNSTNVV |
| | Spike | IRACIFELCDNPFFAVSKPMGTQTHTMIFDNAFNCT |
| | glycoprotein | FEYISDAFSLDVSEKSGNFKHLREFVFKNKDGFLYVYKGYQPI |
| | (GenBank: | DVVRDLPSGFNTLKPIFKLPLGINITNFRAILTAFSP |
| | AAR07631) | AQDTWGTSAAAYFVGYLKPTTFMLKYDENGTITDAVDCSQNP |
| | | LAELKCSVKSFEIDKGIYQTSNFRVVPSGDVVRFPNIT |
| | | NLCPFGEVFNATKFPSVYAWERKKISNCVADYSVLYNSTFFST |
| | | FKCYGVSATKLNDLCFSNVYADSFVVKGDDVRQIAPG |
| | | QTGVIADYNYKLPDDFMGCVLAWNTRNIDATSTGNYNYKYRY |
| | | LRHGKLRPFERDISNVPFSPDGKPCTPPALNCYWPLSD |
| | | YGFYTTTGIGYQPYRVVVLSFELLNAPATVCGPKLSTDLIKNQC |
| | | VNFNFNGLTGTGVLTPSSKRFQPFQQFGRDVSDFTD |
| | | SVRDPKTSEILDISPRSFGGVSVITPGTNASSEVAVLYQDVNCT |
| | | DVSTAIHADQLTPAWRIYSTGNNVFQTQAGCLIGAE |
| | | HVDTSYECDIPIGAGICASYHTVSLLRSTSQKSIVAYTMSLGAD |
| | | SSIAYSNNTIAIPTNFSISITTEVMPVSMAKTSVDC |
| | | NMYICGDSTECANLLLQYGSFCTQLNRALSGIAAEQDRNTREV |
| | | FAQVKQMYKTPTLKYFGGFNFSQILPDPLKPTKRSFI |
| | | EDLLFNKVTLADAGFMKQYGECLGDINARDLICAQKFNGLTVL |
| | | PPLLTVDMIAAYTAALVSGTATAGWTFGAGAALQIPF |
| | | AMQMAYRFNGIGVTQNVLYENQKQIANQFNKAISQIQESLTTT |
| | | STALGKLQDVVNQNAQALNTLVKQLSSNFGAISSVLN |
| | | DILSRLDKVEAEVQIDRLITGRLQSLQTYVTQQLIRAAEIRASAN |
| | | LAATKMSECVLGQSKRVGFCGKGYHLMSFPQAAPH |
| | | GVVFLHVTYVPSQERNFTTAPAICHEGKAYFPREGVFVFNGTS |
| | | WFITQRNFFSPQIITTDNTFVSGNCDVVIGIINNTVY |
| | | DPLQPELDSFKEELDKYFKNHTSPDVDLGDISGINASVVNIQKE |
| | | IDRLNEVAKNLNESLIDLQELGKYEQYIKWPWYVWL |
| | | GFIAGLIAIVIVTILLCCMTSCCSCLKGACSCGSCCKFDEDDSE |
| | | PVLKGVKLHYT |
| 134 | SARS | MFIFLLFLTLTSGSDLDRCTTFDDVQAPNYTQHTSSMRGVYYP |
| | coronavirus | DEIFRSDTLYLTQDLFLPFYSNVTGFHTINHTFGNPV |
| | CS21 | IPFKDGIYFAATEKSNVVRGWVFGSTMNNKSQSVIIINNSTNVV |
| | Spike | IRACNFELCDNPFFAVSKPMGTQTHTMIFDNAFNCT |
| | glycoprotein | FEYISDAFSLDVSEKSGNFKHLREFVFKNKDGFLYVYKGYQPI |
| | (GenBank: | DVVRDLPSGFNTLKPIFKLPLGINITNFRAILTAFSP |
| | ABF68958) | AQDTWGTSAAAYFVGYLKPTTFMLKYDENGTITDAVDCSQNP |
| | | LAELKCSVKSFEIDKGIYQTSNFRVVPSGDVVRFPNIT |
| | | NLCPFGEVFNATKFPSVYAWERKKISNCVADYSVLYNSTFFST |
| | | FKCYGVSATKLNDLCFSNVYADSFVVKGDDVRQIAPG |
| | | QTGVIADYNYKLPDDFMGCVLAWNTRNIDATSTGNYNYKYRY |
| | | LRHGKLRPFERDISNVPFSPDGKPCTPPAPNCYWPLNG |
| | | YGFYTTSGIGYQPYRVVVLSFELLNAPATVCGPKLSTDLIKNQ |
| | | CVNFNFNGLTGTGVLTPSSKRFQPFQQFGRDVSDFTD |
| | | SVRDPKTSEILDISPCSFGGVSVITPGTNASSEVAVLYQDVNCT |
| | | DVSTAIHADQLTPAWRIYSTGNNVFQTQAGCLIGAE |
| | | HVDTSYECDIPIGAGICASYHTVSLLRSTSQKSIVAYTMSLGAD |
| | | SSIAYSNNTIAIPTNFSISITTEVMPVSMAKTSVDC |
| | | NMYICGDSTECANLLLQYGSFCTQLNRALSGIAAEQDRNTREV |
| | | FAQVKQMYKTPTLKYFGGFNFSQILPDPLKPTKRSFI |
| | | EDLLFNKVTLADAGFMKQYGECLGDINARDLICAQKFNGLTVL |
| | | PPLLTDDMIAAYTAALVSGTATAGWTFGAGAALQIPF |
| | | AMQMAYRFNGIGVTQNVLYENQKQIANQFNKAISQIQESLTTT |
| | | STALGKLQDVVNQNAQALNTLVKQLSSNFGAISSVLN |
| | | DILSRLDKVEAEVQIDRLITGRLQSLQTYVTQQLIRAAEIRASAN |
| | | LAATKMSECVLGQSKRVDFCGKGYHLMSFPQAAPH |
| | | GVVFLHVTYVPSQERNFTTAPAICHEGKAYFPREGVFVFNGTS |
| | | WFITQRNFFSPQIITTDNTFVSGNCDVVIGIINNTVY |
| | | DPLQPELDSFKEELDKYFKNHTSPDVDLGDISGINASVVNIQKE |
| | | IDRLNEVAKNLNESLIDLQELGKYEQYIKWPWYVWL |
| | | GFIAGLIAIVMVTILLCCMTSCCSCLKGACSCGSCCKFDEDDSE |
| | | PVLKGVKLHYT |
| 135 | SARS | MFIFLLFLTLTSGSDLDRCTTFDDVQAPNYTQHTSSMRGVYYP |
| | coronavirus | DEIFRSDTLYLTQDLFLPFYSNVTGFHTINHTFGNPV |
| | ES260 | IPFKDGIYFAATEKSNVVRGWVFGSTMNNKSQSVIIINNSTNVV |
| | Spike | IRACNFELCDNPFFAVSKPMGTQTHTMIFDNAFNCT |
| | glycoprotein | FEYISDAFSLDVSEKSGNFKHLREFVFKNKDGFLYVYKGYQPI |
| | (GenBank: | DVVRDLPSGFNTLKPIFKLPLGINITNFRAILTAFSP |
| | ABF68957) | AQDIWGTSAAAYFVGYLKPTTFMLKYDENGTITDAVDCSQNPL |
| | | AELKCSVKSFEIDKGIYQTSNFRVVPSGDVVRFPNIT |
| | | NLCPFGEVFNATKFPSVYAWERKRISNCVADYSVLYNSTSFST |
| | | FKCYGVSATKLNDLCFSNVYADSFVVKGDDVRQIAPG |
| | | QTGVIADYNYKLPDDFMGCVLAWNTRNIDATSTGNYNYKYRY |
| | | LRHGKLRPFERDISNVPFSPDGKPCTPPAPNCYWPLNG |
| | | YGFYTTSGIGYQPYRVVVLSFELLNAPATVCGPKLSTDLIKNQ |
| | | CVNFNFNGLTGTGVLTPSSKRFQPFQQFGRDVSDFTD |
| | | SVRDPKTSEILDISPCSFGGVSVITPGTNASSEVAVLYQDVNCT |
| | | DVSTAIHADQLTPAWRIYSTGNNVFQTQAGCLIGAE |
| | | HVDTSYECDIPIGAGICASYHTVSLLRSTSQKSIVAYTMSLGAD |
| | | SSIAYSNNTIAIPTNFSISITTEVMPVSMAKTSVDC |
| | | NMYICGDSTECANLLLQYGSFCTQLNRALSGIAAEQDRNTREV |
| | | FAQVKQMYKTPTLKYFGGFNFSQILPDPLKPTKRSFI |
| | | EDLLFNKVTLADAGFMKQYGECLGDINARDLICAQKFNGLTVL |
| | | PPLLTDDMIAAYTAALVSGTATAGWTFGAGAALQIPF |
| | | AMQMAYRFNGIGVTQNVLYENQKQIANQFNKAISQIQESLTTT |
| | | STALGKLQDVVNQNAQALNTLVKQLSSNFGAISSVLN |
| | | DILSRLDKVEAEVQIDRLITGRLQSLQTYVTQQLIRAAEIRASAN |
| | | LAATKMSECVLGQSKRVDFCGKGYHLMSFPQAAPH |
| | | GVVFLHVTYVPSQERNFTTAPAICHEGKAYFPREGVFVFNGTS |
| | | WFITQRNFFSPQIITTDNTFVSGNCDVVIGIINNTVY |
| | | DPLQPELDSFKEELDKYFKNHTSPDVDLGDISGINASVVNIQKE |
| | | IDRLNEVAKNLNESLIDLQELGKYEQYIKWPWYVWL |
| | | GFIAGLIAIVMVTILLCCVTSCCSCLKGACSCGSCCKFDEDDSE |
| | | PVLKGVKLHYT |
| 136 | SARS | MFIFLLFLTLTSGSDLDRCTTFDDVQAPNYTQHTSSMRGVYYP |
| | coronavirus | DEIFRSDTLYLTQDLFLPFYSNVTGFHTINHTFDNPV |
| | CS24 | IPFKDGIYFAATEKSNVVRGWVFGSTMNNKSQSVIIINNSTNVV |
| | Spike | IRACNFELCDNPFFAVSKPMGTQTHTMIFDNAFNCT |
| | glycoprotein | FEYISDAFSLDVSEKSGNFKHLREFVFKNKDGFLYVYKGYQPI |
| | (GenBank: | DVVRDLPSGFNTLKPIFKLPLGINITNFRAILTAFSP |
| | ABF68959) | AQDIWGTSAAAYFVGYLKPTTFMLKYDENGTITDAVDCSQNPL |
| | | AELKCSVKSFEIDKGIYQTSNFRVVPSGDVVRFPNIT |
| | | NLCPFGEVFNATKFPSVYAWERKKISNCVADYSVLYNSTFFST |
| | | FKCYGVSATKLNDLCFSNVYADSFVVKGDDVRQIAPG |
| | | QTGVIADYNYKLPDDFMGCVLAWNTRNIDATSTGNYNYKYRY |
| | | LRHGKLRPFERDISNVPFSPDGKPCTPPAPNCYWPLND |
| | | YGFYTTSGIGYQPYRVVVLSFELLNAPATVCGPKLSTDLIKNQ |
| | | CVNFNFNGLTGTGVLTPSSKRFQPFQQFGRDVSDFTD |
| | | SVRDPKTSEILDISPCAFGGVSVITPGTNASSEVAVLYQDVNCT |
| | | DVSTAIHADQLTPAWRIYSTGNNVFQTQAGCLIGAE |
| | | HVDTSYECDIPIGAGICASYHTVSLLRSTSQKSIVAYTMSLGAD |
| | | SSIAYSNNTIAIPTNFSISITTEVMPVSMAKTSVDC |
| | | NMYICGDSTECANLLLQYGSFCTQLNRALSGIAAEQDRNTREV |
| | | FAQVKQMYKTPTLKYFGGFNFSQILPDPLKPTKRSFI |
| | | EDLLFNKVTLADAGFMKQYGECLGDINARDLICAQKFNGLTVL |
| | | PPLLTDDMIAAYTAALVSGTATAGWTFGAGAALQIPF |
| | | AMQMAYRFNGIGVTQNVLYENQKQIANQFNKAISQIQESLTTT |
| | | STALGKLQDVVNQNAQALNTLVKQLSSNFGAISSVLN |
| | | DILSRLDKVEAEVQIDRLITGRLQSLQTYVTQQLIRAAEIRASAN |
| | | LAATKMSECVLGQSKRVDFCGKGYHLMSFPQAAPH |
| | | GVVFLHVTYVPSQERNFTTAPAICHEGKAYFPREGVFVFNGTS |
| | | WFITQRNFFSPQIITTDNTFVSGNCDVVIGIINNTVY |
| | | DPLQPELDSFKEELDKYFKNHTSPDVDLGDISGINASVVNIQKE |
| | | IDRLNEVAKNLNESLIDLQELGKYEQYIKWPWYVWL |
| | | GFIAGLIAIVMVTILLCCVTSCCSCLKGACSCGSCCKFDEDDSE |
| | | PVLKGVKLHYT |
| 137 | SARS | MFIFLLFLTLTSGSDLDRCTTFDDVQAPNYTQHTSSMRGVYYP |
| | coronavirus | DEIFRSDTLYLTQDLFLPFYSNVTGFHTINHTFDNPV |
| | ES191 | IPFKDGIYFAATEKSNVVRGWVFGSTMNNKSQSVIIINNSTNVV |
| | Spike | IRACNFELCDNPFFAVSKPMGTQTHTMIFDNAFNCT |
| | glycoprotein | FEYISDAFSLDVSEKSGNFKHLREFVFKNKDGFLYVYKGYQPI |
| | (GenBank: | DVVRDLPSGFNTLKPIFKLPLGINITNFRAILTAFSP |
| | ABF68956) | AQDIWGTSAAAYFVGYLKPTTFMLKYDENGTITDAVDCSQNPL |
| | | AELKCSVKSFEIDKGIYQTSNFRVVPSGDVVRFPNIT |
| | | NLCPFGEVFNATKFPSVYAWERKRISNCVADYSVLYNSTFFST |
| | | FKCYGVSATKLNDLCFSNVYADSFVVKGDDVRQIAPG |
| | | QTGVIADYNYKLPDDFMGCVLAWNTRNIDATSTGNYNYKYRY |
| | | LRHGKLRPFERDISNVPFSPDGKPCTPPAPNCYWPLRG |
| | | YGFYTTSGIGYQPYRVVVLSFELLNAPATVCGPKLSTDLIKNQ |
| | | CVNFNFNGLTGTGVLTPSSKRFQPFQQFGRDVSDFTD |
| | | SVRDPKTSEILDISPCSFGGVSVITPGTNASSEVAVLYQDVNCT |
| | | DVSTAIHADQLTPAWRIYSTGNNVFQTQAGCLIGAE |
| | | HVDTSYECDIPIGAGICASYHTVSLLRSTSQKSIVAYTMSLGAD |
| | | SSIAYSNNTIAIPTNFSIGITTEVMPVSMAKTSVDC |
| | | NMYICGDSTECANLLLQYGSFCTQLNRALSGIAAEQDRNTREV |
| | | FAQVKQMYKTPTLKYFGGFNFSQILPDPLKPTKRSFI |
| | | EDLLFNKVTLADAGFMKQYGECLGDINARDLICAQKFNGLTVL |
| | | PPLLTDDMIAAYTAALVSGTATAGWTFGAGAALQIPF |
| | | AMQMAYRFNGIGVTQNVLYENQKQIANQFNKAISQIQESLTTT |
| | | STALGKLQDVVNQNAQALNTLVKQLSSNFGAISSVLN |
| | | DILSRLDKVEAEVQIDRLITGRLQSLQTYVTQQLIRAAEIRASAN |
| | | LAATKMSECVLGQSKRVDFCGKGYHLMSFPQAAPH |
| | | GVVFLHVTYVPSQERNFTTAPAICHEGKAYFPREGVFVFNGTS |
| | | WFITQRNFFSPQIITTDNTFVSGNCDVVIGIINNTVY |
| | | DPLQPELDSFKEELDKYFKNHTSPDVDLGDISGINASVVNIQKE |
| | | IDRLNEVAKNLNESLIDLQELGKYEQYIKWPWYVWL |
| | | GFIAGLIAIVMVTILLCCVTSCCSCLKGACSCGSCCKFDEDDSE |
| | | PVLKGVKLHYT |
| 138 | SARS | MFIFLLFLTLTSGSDLDRCTTFDDVQAPNYTQHTSSMRGVYYP |
| | coronavirus | DEIFRSDTLYLTQDLFLPFYSNVTGFHTINHTFDNPV |
| | WF188 | IPFKDGIYFAATEKSNVVRGWVFGSTMNNKSQSVIIINNSTNVV |
| | Spike | IRACNFELCDNPFFAVSKPMGTQTHTMIFDNAFNCT |
| | glycoprotein | FEYISDAFSLDVSEKSGNFKHLREFVFKNKDGFPYVYKGYQPI |
| | (GenBank: | DVVRDLPSGFNTLKPIFKLPLGINITNFRAILTAFSP |
| | ABF68955) | AQDTWGTSAAAYFVGYLKPTTFMLKYDENGTITDAVDCSQNP |
| | | LAELKCSVKSFKIDKGIYQTSNFRVVPSGDVVRFPNIT |
| | | NLCPFGEVFNATKFPSVYAWERKRISNCVADYSVLYNSTFFST |
| | | FKCYGVSATKLNDLCFSNVYADSFVVKGDDVRQIAPG |
| | | QTGVIADYNYKLPDDFMGCVLAWNTRNIDATSTGNYNYKYRY |
| | | LRHGKLRPFERDISNVPFSPDGKPCTPPAPNCYWPLRG |
| | | YGFYTTSGIGYQPYRVVVLSFELLNAPATVCGPKLSTDLIKNQ |
| | | CVNFNFNGLTGTGVLTPSSKRFQPFQQFGRDVSDFTD |
| | | SVRDPKTSEILDISPCSFGGVSVITPGTNASSEVAVLYQDVNCT |
| | | DVSTAIHADQLTPAWRIYSTGNNVFQTQAGCLIGAE |
| | | HVDTSYECDTPIGAGICASYHTVSSLRSTSQKSIVAYTMSLGA |
| | | DSSIAYSNNTIAIPTNFSISITTEVMPVSMAKTSVDC |
| | | NMYICGDSTECANLLLQYGSFCTQLNRALSGIAAEQDRNTREV |
| | | FAQVKQMYKTPTLKYFGGFNFSQILPDPLKPTKRSFI |
| | | EDLLFNKVTLADAGFMKQYGECLGDINARDLICAQKFNGLTVL |
| | | PPLLTDDMIAAYTAALVSGTATAGWTFGAGAALQIPF |
| | | AMQMAYRFNGIGVTQNVLYENQKQIANQFNKAISQIQESLTTT |
| | | STALGKLQDVVNQNAQALNTLVKQLSSNFGAISSVLN |
| | | DILSRLDKVEAEVQIDRLITGRLQSLQTYVTQQLIRAAEIRASAN |
| | | LAATKMSECVLGQSKRVDFCGKGYHLMSFPQAAPH |
| | | GVVFLHVTYVPSQERNFTTAPAICHEGKAYFPREGVFVFNGTS |
| | | WFITQRNFFSPQIITTDNTFVSGNCDVVIGIINNTVY |
| | | DPLQPELDSFKEELDKYFKNHTSPDVDLGDISGINASVVNIQKE |
| | | IDRLNEVAKNLNESLIDLQELGKYEQYIKWPWYVWL |
| | | GFIAGLIAIVMVTILLCCVTSCCSCLKGACSCGSCCKFDEDDSE |
| | | PVLKGVKLHYT |
| 139 | SARS | MFIFLLFLTLTSGSDLDRCTTFDDVQAPNYTQHTSSMRGVYYP |
| | coronavirus | DEIFRSDTLYLTQDLFLPFYSNVTGFHTINHTFDNPV |
| | PC4-137 | IPFKDGIYFAATEKSNVVRGWVFGSTMNNKSQSVIIINNSTNVV |
| | Spike | IRACNFELCDNPFFVVSKPMGTRTHTMIFDNAFNCT |
| | glycoprotein | FEYISDAFSLDVSEKSGNFKHLREFVFKNKDGFLYVYKGYQPI |
| | (GenBank: | DVVRDLPSGFNTLKPIFKLPLGINITNFRAILTAFSP |
| | AAV49720) | AQDTWGTSAAAYFVGYLKPTTFMLKYDENGTITDAVDCSQNP |
| | | LAELKCSVKSFEIDKGIYQTSNFRVVPSGDVVRFPNIT |
| | | NLCPFGEVFNATKFPSVYAWERKRISNCVADYSVLYNSTSFST |
| | | FKCYGVSATKLNDLCFSNVYADSFVVKGDDVRQIAPG |
| | | QTGVIADYNYKLPDDFMGCVLAWNTRNIDATSTGNYNYKYRY |
| | | LRHGKLRPFERDISNVPFSPDGKPCTPPAPNCYWPLKG |
| | | YGFYTTSGIGYQPYRVVVLSFELLNAPATVCGPKLSTDLIKNQ |
| | | CVNFNFNGLTGTGVLTPSSKRFQPFQQFGRDVSDFTD |
| | | SVRDPKTSEILDISPCSFGGVSVITPGTNASSEVAVLYQDVNCT |
| | | DVSTLIHADQLTPAWRIYSTGNNVFQTQAGCLIGAE |
| | | HVDTSYECDIPIGAGICASYHTVSSLRSTSQKSIVAYTMSLGAD |
| | | SSIAYSNNTIAIPTNFSISITTEVMPVSMAKTSVDC |
| | | NMYICGDSTECANLLLQYGSFCRQLNRALSGIAAEQDRNTRE |
| | | VFAQVKQMYKTPTLKDFGGFNFSQILPDPLKPTKRSFI |
| | | EDLLFNKVTLADAGFMKQYGECLGDINARDLICAQKFNGLTVL |
| | | PPLLTDDMIAAYTAALVSGTATAGWTFGAGAALQIPF |
| | | AMQMAYRFNGIGVTQNVLYENQKQIANQFNKAISQIQESLTTT |
| | | STALGKLQDVVNQNAQALNTLVKQLSSNFGAISSVLN |
| | | DILSRLDKVEAEVQIDRLITGRLQSLQTYVTQQLIRAAEIRASAN |
| | | LAATKMSECVLGQSKRVDFCGKGYHLMSFPQAAPH |
| | | GVVFLHVTYVPSQERNFTTAPAICHEGKAYFPREGVFVFNGTS |
| | | WFITQRNFFSPQIITTDNTFVSGNCDVVIGIINNTVY |
| | | DPLQPELDSFKEELDKYFKNHTSPDVDLGDISGINASVVNIQEE |
| | | IDRLNEVAKNLNESLIDLQELGKYEQYIKWPWYVWL |
| | | GFIAGLIAIVMVTILLCCMTSCCSCLKGACSCGSCCKFDEDDSE |
| | | PVLKGVKLHYT |
| 140 | SARS | MFIFLLFLTLTSGSDLDRCTTFDDVQAPNYTQHTSSMRGVYYP |
| | coronavirus | DEIFRSDTLYLTQDLFLPFYSNVTGFHTINHTFDNPV |
| | PC4-199 | IPFKDGIYFAATEKSNVVRGWVFGSTMNNKSQSVIIINNSTNVV |
| | Spike | IRACNFELCDNPFFVVSKPMGTRTHTMIFDNAFNCT |
| | glycoprotein | FEYISDAFSLDVSEKSGNFKHLREFVFKNKDGFLYVYKGYQPI |
| | (GenBank: | DVVRDLPSGFNTLKPIFKLPLGINITNFRAILTAFSP |
| | AAV49722) | AQDTWGTSAAAYFVGYLKPTTFMLKYDENGTITDAVDCSQNP |
| | | LAELKCSVKSFEIDKGIYQTSNFRVVPSGDVVRFPNIT |
| | | NLCPFGEVFNATKFPSVYAWERKRISNCVADYSVLYNSTSFST |
| | | FKCYGVSATKLNDLCFSNVYADSFVVKGDDVRQIAPG |
| | | QTGVIADYNYKLPDDFMGCVLAWNTRNIDATSTGNYNYKYRY |
| | | LRHGKLRPFERDISNVPFSPDGKPCTPPAPNCYWPLRG |
| | | YGFYTTSGIGYQPYRVVVLSFELLNAPATVCGPKLSTDLIKNQ |
| | | CVNFNFNGLTGTGVLTPSSKRFQPFQQFGRDVSDFTD |
| | | SVRDPKTSEILDISPCSFGGVSVITPGTNASSEVAVLYQDVNCT |
| | | DVSTLIHAEQLTPAWRIYSTGNNVFQTQAGCLIGAE |
| | | HVDTSYECDIPIGAGICASYHTVSSLRSTSQKSIVAYTMSLGAD |
| | | SSIAYSNNTIAIPTNFSISITTEVMPVSMAKTSVDC |
| | | NMYICGDSTECANLLLQYGSFCRQLNRALSGIAAEQDRNTRE |
| | | VFAQVKQMYKTPTLKDFGGFNFSQILPDPLKPTKRSFI |
| | | EDLLFNKVTLADAGFMKQYGECLGDINARDLICAQKFNGLTVL |
| | | PPLLTDDMIAAYTAALVSGTATAGWTFGAGAALQIPF |
| | | AMQMAYRFNGIGVTQNVLYENQKQIANQFNKAISQIQESLTTT |
| | | STALGKLQDVVNQNAQALNTLVKQLSSNFGAISSVLN |
| | | DILSRLDKVEAEVQIDRLITGRLQSLQTYVTQQLIRAAEIRASAN |
| | | LAATKMSECVLGQSKRVDFCGKGYHLMSFPQAAPH |
| | | GVVFLHVTYVPSQERNFTTAPAICHEGKAYFPREGVFVFNGTS |
| | | WFITQRNFFSPQIITTDNTFVSGNCDVVIGIINNTVY |
| | | DPLQPELDSFKEELDKYFKNHTSPDVDLGDISGINASVVNIQEE |
| | | IDRLNEVAKNLNESLIDLQELGKYEQYIKWPWYVWL |
| | | GFIAGLIAIVMVTILLCCMTSCCSCLKGACSCGSCCKFDEDDSE |
| | | PVLKGVKLHYT |
| 141 | SARS | MFIFLLFLTLTSGSDLDRCTTFDDVQAPNYTQHTSSMRGVYYP |
| | coronavirus | DEIFRSDTLYLTQDLFLPFYSNVTGFHTINHTFDNPV |
| | PC4-241 | IPFKDGIYFAATEKSNVVRGWVFGSTMNNKSQSVIIINNSTNVV |
| | Spike | IRACNFELCDNPFFVVSKPMGTRTHTMIFDNAFNCT |
| | glycoprotein | FEYISDAFSLDVSEKSGNFKHLREFVFKNKDGFLYVYKGYQPI |
| | (GenBank: | DVVRDLPSGFNTLKPIFKLPLGINITNFRAILTAFSP |
| | AAV49723) | AQDTWGTSAAAYFVGYLKPTTFMLKYDENGTITDAVDCSQNP |
| | | LAELKCSVKSFEIDKGIYQTSNFRVVPSGDVVRFPNIT |
| | | NLCPFGEVFNATKFPSVYAWERKRISNCVADYSVLYNSTSFST |
| | | FKCYGVSATKLNDLCFSNVYADSFVVKGDDVRQIAPG |
| | | QTGVIADYNYKLPDDFMGCVLAWNTRNIDATSTGNYNYKYRY |
| | | LRHGKLRPFERDISNVPFSPDGKPCTPPAPNCYWPLNG |
| | | YGFYTTSGIGYQPYRVVVLSFELLNAPATVCGPKLSTDLIKNQ |
| | | CVNFNFNGLTGTGVLTPSSKRFQPFQQFGRDVSDFTD |
| | | SVRDPKTSEILDISPCSFGGVSVITPGTNASSEVAVLYQDVNCT |
| | | DVSTLIHAEQLTPAWRIYSTGNNVFQTQAGCLIGAE |
| | | HVDTSYECDIPIGAGICASYHTVSSLRSTSQKSIVAYTMSLGAD |
| | | SSIAYSNNTIAIPTNFSISITTEVMPVSMAKTSVDC |
| | | NMYICGDSTECANLLLQYGSFCTQLNRALSGIAAEQDRNTREV |
| | | FVQVKQMYKTPTLKDFGGFNFSQILPDPLKPTKRSFI |
| | | EDLLFNKVTLADAGFMKQYGECLGDINARDLICAQKFNGLTVL |
| | | PPLLTDDMIAAYTAALVSGTATAGWTFGAGAALQIPF |
| | | AMQMAYRFNGIGVTQNVLYENQKQIANQFNKAISQIQESLTTT |
| | | STALGKLQDVVNQNAQALNTLVKQLSSNFGAISSVLN |
| | | DILSRLDKVEAEVQIDRLITGRLQSLQTYVTQQLIRAAEIRASAN |
| | | LAATKMSECVLGQSKRVDFCGKGYHLMSFPQAAPH |
| | | GVVFLHVTYVPSQERNFTTAPAICHEGKAYFPREGVFVFNGTS |
| | | WFITQRNFFSPQIITTDNTFVSGNCDVVIGIINNTVY |
| | | DPLQPELDSFKEELDKYFKNHTSPDVDLGDISGINASVVNIQEE |
| | | IDRLNEVAKNLNESLIDLQELGKYEQYIKWPWYVWL |
| | | GFIAGLIAIVMVTILLCCMTSCCSCLKGACSCGSCCKFDEDDSE |
| | | PVLKGVKLHYT |
| 142 | SARS | MFIFLLFLTLTSGSDLDRCTTFDDVQAPNYTQHTSSMRGVYYP |
| | coronavirus | DEIFRSDTLYLTQDLFLPFYSNVTGFHTINHTFDNPV |
| | PC4-115 | IPFKDGIYFAATEKSNVVRGWVFGSTMNNKSQSVIIINNSTNVV |
| | Spike | IRACNFELCDNPFFVVSKPMGTRTHTMIFDNAFNCT |
| | glycoprotein | FEYISDAFSLDVSEKSGNFKHLREFVFKNKDGFLYVYKGYQPI |
| | (GenBank: | DVVRDLPSGFNTLKPIFKLPLGINITNFRAILTAFSP |
| | AAV49719) | AQDTWGTSAAAYFVGYLKPTTFMLKYDENGTITDAVDCSQNP |
| | | LAELKCSVKSFEIDKGIYQTSNFRVVPSGDVVRFPNIT |
| | | NLCPFGEVFNATKFPSVYAWERKRISNCVADYSVLYNSTSFST |
| | | FKCYGVSATKLNDLCFSNVYADSFVVKGDDVRQIAPG |
| | | QTGVIADYNYKLPDDFMGCVLAWNTRNIDATSTGNYNYKYRY |
| | | LRHGKLRPFERDISNVPFSPDGKPCTPPAPNCYWPLNG |
| | | YGFYTTSGIGYQPYRVVVLSFELLNAPATVCGPKLSTDLIKNQ |
| | | CVNFNFNGLTGTGVLTPSSKRFQPFQQFGRDVSDFTD |
| | | SVRDPKTSEILDISPCSFGGVSVITPGTNASSEVAVLYQDVNCT |
| | | DVSTLIHAEQLTPAWRIYSTGNNVFQTQAGCLIGAE |
| | | HVDTSYECDIPIGAGICASYHTVSSLRSTSQKSIVAYTMSLGAD |
| | | SSIAYSNNTIAIPTNFSISITTEVMPVSMAKTSVDC |
| | | NMYICGDSTECANLLLQYGSFCRQLNRALSGIAAEQDRNTRE |
| | | VFVQVKQMYKTPTLKDFGGFNFSQILPDPLKPTKRSFI |
| | | EDLLFNKVTLADAGFMKQYGECLGDINARDLICAQKFNGLTVL |
| | | PPLLTDDMIAAYTAALVSGTATAGWTFGAGAALQIPF |
| | | AMQMAYRFNGIGVTQNVLYENQKQIANQFNKAISQIQESLTTT |
| | | STALGKLQDVVNQNAQALNTLVKQLSSNFGAISSVLN |
| | | DILSRLDKVEAEVQIDRLITGRLQSLQTYVTQQLIRAAEIRASAN |
| | | LAATKMSECVLGQSKRVDFCGKGYHLMSFPQAAPH |
| | | GVVFLHVTYVPSQERNFTTAPAICHEGKAYFPREGVFVFNGTS |
| | | WFITQRNFFSPQIITTDNTFVSGNCDVVIGIINNTVY |
| | | DPLQPELDSFKEELDKYFKNHTSPDVDLGDISGINASVVNIQEE |
| | | IDRLNEVAKNLNESLIDLQELGKYEQYIKWPWYVWL |
| | | GFIAGLIAIVMVTILLCCMTSCCSCLKGACSCGSCCKFDEDDSE |
| | | PVLKGVKLHYT |
| 143 | SARS | MFIFLLFLTLTSGSDLDRCTTFDDVQAPNYTQHTSSMRGVYYP |
| | coronavirus | DEIFRSDTLYLTQDLFLPFYSNVTGFHTINHTFDDPV |
| | GD03T0013 | IPFKDGIYFAATEKSNVVRGWVFGSTMNNKSQSVIIINNSTNVV |
| | Spike | IRACNFELCDNPFFVVSKPMGTRTHTMIFDNAFNCT |
| | glycoprotein | FEYISDAFSLDVSEKSGNFKHLREFVFKNKDGFLYVYKGYQPI |
| | (GenBank: | DVVRDLPSGFNTLKPIFKLPLGINITNFRAILTAFSP |
| | AAS10463) | AQDTWGTSAAAYFVGYLKPTTFMLKYDENGTITDAVDCSQNP |
| | | LAELKCSVKSFEIDKGIYQTSNFRVVPSGDVVRFPNIT |
| | | NLCPFGEVFNATKFPSVYAWERKRISNCVADYSVLYNSTSFST |
| | | FKCYGVSATKLNDLCFSNVYADSFVVKGDDVRQIAPG |
| | | QTGVIADYNYKLPDDFMGCVLAWNTRNIDATSTGNYNYKYRY |
| | | LRHGKLRPFERDISNVPFSPDGKPCTPPAPNCYWPLNG |
| | | YGFYTTSGIGYQPYRVVVLSFELLNAPATVCGPKLSTDLIKNQ |
| | | CVNFNFNGLTGTGVLTPSSKRFQPFQQFGRDVSDFTD |
| | | SVRDPKTSEILDISPCSFGGVSVITPGTNASSEVAVLYQDVNCT |
| | | DVSTLIHAEQLTPAWRIYSTGNNVFQTQAGCLIGAE |
| | | HVDTSYECDIPIGAGICASYHTVSSLRSTSQKSIVAYTMSLGAD |
| | | SSIAYSNNTIAIPTNFSISITTEVMPVSMAKTSVDC |
| | | NMYICGDSTECANLLLQYGSFCRQLNRALSGIAAEQDRNTRE |
| | | VFVQVKQMYKTPTLKDFGGFNFSQILPDPLKPTKRSFI |
| | | EDLLFNKVTLADAGFMKQYGECLGDINARDLICAQKFNGLTVL |
| | | PPLLTDDMIAAYTAALVSGTATAGWTFGAGAALQIPF |
| | | AMQMAYRFNGIGVTQNVLYENQKQIANQFNKAISQIQESLTTT |
| | | STALGKLQDVVNQNAQALNTLVKQLSSNFGAISSVLN |
| | | DILSRLDKVEAEVQIDRLITGRLQSLQTYVTQQLIRAAEIRASAN |
| | | LAATKMSECVLGQSKRVDFCGKGYHLMSFPQAAPH |
| | | GVVFLHVTYVPSQERNFTTAPAICHEGKAYFPREGVFVFNGTS |
| | | WFITQRNFFSPQIITTDNTFVSGNCDVVIGIINNTVY |
| | | DPLQPELDSFKEELDKYFKNHTSPDVDLGDISGINASVVNIQEE |
| | | IDRLNEVAKNLNESLIDLQELGKYEQYIKWPWYVWL |
| | | GFIAGLIAIVMVTILLCCMTSCCSCLKGACSCGSCCKFDEDDSE |
| | | PVLKGVKLHYT |
| 144 | SARS | MFIFLLFLTLTSGSDLDRCTTFDDVQAPNYTQHTSSMRGVYYP |
| | coronavirus | DEIFRSDTLYLTQDLFLPFYSNVTGFHTINHTFDNPV |
| | B012 | IPFKDGIYFAATEKSNVVRGWVFGSTMNNKSQSVIIINNSTNVV |
| | Spike | IRACNFELCDNPFFVVSKPMGTRTHTMIFDNAFNCT |
| | glycoprotein | FEYISDAFSLDVSEKSGNFKHLREFVFKNKDGFLYVYKGYQPI |
| | (GenBank: | DVVRDLPSGFNTLKPIFKLPLGINITNFRAILTAFSP |
| | AAV97989) | AQDTWGTSAAAYFVGYLKPTTFMLKYDENGTITDAVDCSQNP |
| | | LAELKCSVKSFEIDKGIYQTSNFRVVPSGDVVRFPNIT |
| | | NLCPFGEVFNATKFPSVYAWERKRISNCVADYSVLYNSTSFST |
| | | FKCYGVSATKLNDLCFSNVYADSFVVKGDDVRQIAPG |
| | | QTGVIADYNYKLPDDFMGCVLAWNTRNIDATSTGNYNYKYRY |
| | | LRHGKLRPFERDISNVPFSPDGKPCTPPAPNCYWPLNG |
| | | YGFYTTSGIGYQPYRVVVLSFELLNAPATVCGPKLSTDLIKNQ |
| | | CVNFNFNGLTGTGVLTPSSKRFQPFQQFGRDVSDFTD |
| | | SVRDPKTSEILDISPCSFGGVSVITPGTNASSEVAVLYQDVNCT |
| | | DVSTLIHAEQLTPAWRIYSTGNNVFQTQAGCLIGAE |
| | | HVDTSYECDIPIGAGICASYHTVSSLRSTSQKSIVAYTMSLGAD |
| | | SSIAYSNNTIAIPTNFSISITTEVMPVSMAKTSVDC |
| | | NMYICGDSTECANLLLQYGSFCRQLNRALSGIAAEQDRNTRE |
| | | VFVQVKQMYKTPTLKDFGGFNFSQILPDPLKPTKRSFI |
| | | EDLLFNKVTLADAGFMKQYGECLGDINARDLICAQKFNALTVL |
| | | TPLLTDDMIAAYTAALVSGTATAGWTFGAGAALQIPF |
| | | AMQMAYRFNGIGVTQNVLYENQKQIANQFNKAISQIQESLTTT |
| | | STALGKLQDVVNQNAQALNTLVKQLSSNFGAISSVLN |
| | | DILSRLDKVEAEVQIDRLITGRLQSLQTYVTQQLIRAAEIRASAN |
| | | LAATKMSECVLGQSKRVDFCGKGYHLMSFPQAAPH |
| | | GVVFLHVTYVPSQERNFTTAPAICHEGKAYFPREGVFVFNGTS |
| | | WFITQRNFFSPQIITTDNTFVSGNCDVVIGIINNTVY |
| | | DPLQPELDSFKEELDKYFKNHTSPDVDLGDISGINASVVNIQEE |
| | | IDRLNEVAKNLNESLIDLQELGKYEQYIKWPWYVWL |
| | | GFIAGLIAIVMVTILLCCMTSCCSCLKGACSCGSCCKFDEDDSE |
| | | PVLKGVKLHYT |
| 145 | SARS | MFIFLLFLTLTSGSDLDRCTTFDDVQAPNYTQHTSSMRGVYYP |
| | coronavirus | DEIFRSDTLYLTQDLFLPFYSNVTGFHTINHTFDNPV |
| | civet020 | IPFKDGIYFAATEKSNVVRGWVFGSTMNNKSQSVIIINNSTNVV |
| | Spike | IRACNFELCDNPFFVVSKPMGTRTHTMIFDNAFNCT |
| | glycoprotein | FEYISDAFSLDVSEKSGNFKHLREFVFKNKDGFLYVYKGYQPI |
| | (GenBank: | DVVRDLPSGFNTLKPIFKLPLGINITNFRAILTAFSP |
| | AAU04664) | AQDTWGTSAAAYFVGYLKPTTFMLKYDENGTITDAVDCSQNP |
| | | LAELKCSVKSFEIDKGIYQTSNFRVVPSGDVVRFPNIT |
| | | NLCPFGEVFNATKFPSVYAWERKRISNCVADYSVLYNSTSFST |
| | | FKCYGVSATKLNDLCFSNVYADSFVVKGDDVRQIAPG |
| | | QTGVIADYNYKLPDDFMGCVLAWNTRNIDATSTGNYNYKYRY |
| | | LRHGKLRPFERDISNVPFSPDGKPCTPPAPNCYWPLRG |
| | | YGFYTTSGIGYQPYRVVVLSFELLNAPATVCGPKLSTDLIKNQ |
| | | CVNFNFNGLTGTGVLTPSSKRFQPFQQFGRDVSDFTD |
| | | SVRDPKTSEILDISPCSFGGVSVITPGTNASSEVAVLYQDVNCT |
| | | DVSTLIHAEQLTPAWRIYSTGNNVFQTQAGCLIGAE |
| | | HVDTSYECDIPIGAGICASYHTVSSLRSTSQKSIVAYTMSLGAD |
| | | SSIAYSNNTIAIPTNFSISITTEVMPVSMAKTSVDC |
| | | NMYICGDSTECANLLLQYGSFCRQLNRALSGIAAEQDRNTRE |
| | | VFVQVKQMYKTPTLKDFGGFNFSQILPDPLKPTKRSFI |
| | | EDLLFNKVTLADAGFMKQYGECLGDINARDLICAQKFNGLTVL |
| | | PPLLTDDMIAAYTAALVSGTATAGWTFGAGAALQIPF |
| | | AMQMAYRFNGIGVTQNVLYENQKQIANQFNKAISQIQESLTTT |
| | | STALGKLQDVVNQNAQALNTLVKQLSSNFGAISSVLN |
| | | DILSRLDKVEAEVQIDRLITGRLQSLQTYVTQQLIRAAEIRASAN |
| | | LAATKMSECVLGQSKRVDFCGKGYHLMSFPQAAPH |
| | | GVVFLHVTYVPSQERNFTTAPAICHEGKAYFPREGVFVFNGTS |
| | | WFITQRNFFSPQIITTDNTFVSGNCDVVIGIINNTVY |
| | | DPLQPELDSFKEELDKYFKNHTSPDVDLGDISGINASVVNIQEE |
| | | IDRLNEVAKNLNESLIDLQELGKYEQYIKWPWYVWL |
| | | GFIAGLIAIVMVTILLCCMTSCCSCLKGACSCGSCCKFDEDDSE |
| | | PVLKGVKLHYT |
| 146 | SARS | MFIFLLFLTLTSGSDLDRCTTFDDVQAPNYTQHTSSMRGVYYP |
| | coronavirus | DEIFRSDTLYLTQDLFLPFYSNVTGFHTINHTFDNPV |
| | B033 | IPFKDGIYFAATEKSNVVRGWVFGSTMNNKSQSVIIINNSTNVV |
| | Spike | IRACNFELCDNPFFVVSKPMGTRTHTMIFDNAFNCT |
| | glycoprotein | FEYISDAFSLDVSEKSGNFKHLREFVFKNKDGFLYVYKGYQPI |
| | (GenBank: | DVVRDLPSGFNTLKPIFKLPLGINITNFRAILTAFSP |
| | AAV97992) | AQDTWGTSAAAYFVGYLKPTTFMLKYDENGTITDAVDCSQNP |
| | | LAELKCSVKSFEIDKGIYQTSNFRVVPSGDVVRFPNIT |
| | | NLCPFGEVFNATKFPSVYAWERKRISNCVADYSVLYNSTSFST |
| | | FKCYGVSATKLNDLCFSNVYADSFVVKGDDVRQIAPG |
| | | QTGVIADYNYKLPDDFMGCVLAWNTRNIDATSTGNYNYKHRY |
| | | LRHGKLRPFERDISNVPFSPDGKPCTPPAPNCYWPLRG |
| | | YGFYTTSGIGYQPYRVVVLSFELLNAPATVCGPKLSTDLIKNQ |
| | | CVNFNFNGLTGTGVLTPSSKRFQPFQQFGRDVSDFTD |
| | | SVRDPKTSEILDISPCSFGGVSVITPGTNASSEVAVLYQDVNCT |
| | | DVSTLIHAEQLTPAWRIYSTGNNVFQTQAGCLIGAE |
| | | HVDTSYECDIPIGAGICASYHTVSSLRSTSQKSIVAYTMSLGAD |
| | | SSIAYSNNTIAIPTNFSISITTEVMPVSMAKTSVDC |
| | | NMYICGDSTECANLLLQYGSFCRQLNRALSGIAAEQDRNTRE |
| | | VFVQVKQMYKTPTLKDFGGFNFSQILPDPLKPTKRSFI |
| | | EDLLFNKVTLADAGFMKQYGECLGDINARDLICAQKFNGLTVL |
| | | PPLLTDDMIAAYTAALVSGTATAGWTFGAGAALQIPF |
| | | AMQMAYRFNGIGVTQNVLYENQKQIANQFNKAISQIQESLTTT |
| | | STALGKLQDVVNQNAQALNTLVKQLSSNFGAISSVLN |
| | | DILSRLDKVEAEVQIDRLITGRLQSLQTYVTQQLIRAAEIRASAN |
| | | LAATKMSECVLGQSKRVDFCGKGYHLMSFPQAAPH |
| | | GVVFLHVTYVPSQERNFTTAPAICHEGKAYFPREGVFVFNGTS |
| | | WFITQRNFFSPQIITTDNTFVSGNCDVVIGIINNTVY |
| | | DPLQPELDSFKEELDKYFKNHTSPDVDLGDISGINASVVNIQEE |
| | | IDRLNEVAKNLNESLIDLQELGKYEQYIKWPWYVWL |
| | | GFIAGLIAIVMVTILLCCMTSCCSCLKGACSCGSCCKFDEDDSE |
| | | PVLKGVKLHYT |
| 147 | SARS | MFIFLLFLTLTSGSDLDRCTTFDDVQAPNYTQHTSSMRGVYYP |
| | coronavirus | DEIFRSDTLYLTQDLFLPFYSNVTGFHTINHTFDNPV |
| | PC4-205 | IPFKDGIYFAATEKSNVVRGWVFGSTMNNKSQTVIIINNSTNVVI |
| | Spike | RACNFELCDNPFFVVSKPMGTRTHTMIFDNAFNCT |
| | glycoprotein | FEYISDAFSLDVSEKSGNFKHLREFVFKNKDGFLYVYKGYQPI |
| | (GenBank: | DVVRDLPSGFNTLKPIFKLPLGINITNFRAILTAFSP |
| | AAU93319) | AQDTWGTSAAAYFVGYLKPTTFMLKYDENGTITDAVDCSQNP |
| | | LAELKCSVKSFEIDKGIYQTSNFRVVPSGDVVRFPNIT |
| | | NLCPFGEVFNATKFPSVYAWERKRISNCVADYSVLYNSTSFST |
| | | FKCYGVSATKLNDLCFSNVYADSFVVKGDDVRQIAPG |
| | | QTGVIADYNYKLPDDFMGCVLAWNTRNIDATSTGNYNYKYRY |
| | | LRHGKLRPFERDISNVPFSPDGKPCTPPAPNCYWPLRG |
| | | YGFYTTSGIGYQPYRVVVLSFELLNAPATVCGPKLSTDLIKNQ |
| | | CVNFNFNGLTGTGVLTPSSKRFQPFQQFGRDVSDFTD |
| | | SVRDPKTSEILDISPCSFGGVSVITPGTNASSEVAVLYQDVNCT |
| | | DVSTLIHAEQLTPAWRIYSTGNNVFQTQAGCLIGAE |
| | | HVDTSYECDIPIGAGICASYHTVSSLRSTSQKSIVAYTMSLGAD |
| | | SSIAYSNNTIAIPTNFSISITTEVMPVSMAKTSVDC |
| | | NMYICGDSTECANLLLQYGSFCRQLNRALSGIAAEQDRNTRE |
| | | VFVQVKQMYKTPTLKDFGGFNFSQILPDPLKPTKRSFI |
| | | EDLLFNKVTLADAGFMKQYGECLGDINARDLICAQKFNGLTVL |
| | | PPLLTDDMIAAYTAALVSGTATAGWTFGAGAALQIPF |
| | | AMQMAYRFNGIGVTQNVLYENQKQIANQFNKAISQIQESLTTT |
| | | STALGKLQDVVNQNAQALNTLVKQLSSNFGAISSVLN |
| | | DILSRLDKVEAEVQIDRLITGRLQSLQTYVTQQLIRAAEIRASAN |
| | | LAATKMSECVLGQSKRVDFCGKGYHLMSFPQAAPH |
| | | GVVFLHVTYVPSQERNFTTAPAICHEGKAYFPREGVFVFNGTS |
| | | WFITQRNFFSPQIITTDNTFVSGNCDVVIGIINNTVY |
| | | DPLQPELDSFKEELDKYFKNHTSPDVDLGDISGINASVVNIQEE |
| | | IDRLNEVAKNLNESLIDLQELGKYEQYIKWPWYVWL |
| | | GFIAGLIAIVMVTILLCCMTSCCSCLKGACSCGSCCKFDEDDSE |
| | | PVLKGVKLHYT |
| 148 | SARS | MFIFLLFLTLTSGSDLDRCTTFDDVQAPNYTQHTSSMRGVYYP |
| | coronavirus | DEIFRSDTLYLTQDLFLPFYSNVTGFHTINHTFDNPV |
| | C028 | IPFKDGIYFAATEKSNVVRGWVFGSTMNNKSQSVIIINNSTNVV |
| | Spike | IRACNFELCDNPFFVVSKPMGTRTHTMIFDNAFNCT |
| | glycoprotein | FEYISDAFSLDVSEKSGNFKHLREFVFKNKDGFLYVYKGYQPI |
| | (GenBank: | DVVRDLPSGFNTLKPIFKLPLGINITNFRAILTAFSP |
| | AAV98001) | AQDTWGTSAAAYFVGYLKPTTFMLKYDENGTITDAVDCSQNP |
| | | LAELKCSVKSFEIDKGIYQTSNFRVVPSGDVVRFPNIT |
| | | NLCPFGEVFNATKFPSVYAWERKRISNCVADYSVLYNSTSFST |
| | | FKCYGVSATKLNDLCFSNVYADSFVVKGDDVRQIAPG |
| | | QTGVIADYNYKLPDDFMGCVLAWNTRNIDATSTGNYNYKYRY |
| | | LRHGKLRPFERDISNVPFSPDGKPCTPPAPNCYWPLRG |
| | | YGFYTTSGIGYQPYRVVVLSFELLNAPATVCGPKLSTDLIKNQ |
| | | CVNFNFNGLTGTGVLTPSSKRFQPFQQFGRDVSDFTD |
| | | SVRDPKTSEILDISPCSFGGVSVITPGTNASSEVAVLYQDVNCT |
| | | DVSTLIHAEQLTPAWRIYSTGNNVFQTLAGCLIGAE |
| | | HVDTSYDCDIPIGAGICASYHTVSSLRSTSQKSIVAYTMSLGAD |
| | | SSIAYSNNTIAIPTNFSISITTEVMPVSMAKTSVDC |
| | | NMYICGDSTECANLLLQYGSFCRQLNRALSGIAAEQDRNTRE |
| | | VFVQVKQMYKTPTLKDFGGFNFSQILPDPLKPTKRSFI |
| | | EDLLFNKVTLADAGFMKQYGECLGDINARDLICAQKFNGLTVL |
| | | PPLLTDDMIAAYTAALVSGTATAGWTFGAGAALQIPF |
| | | AMQMAYRFNGIGVTQNVLYENQKQIANQFNKAISQIQESLTTT |
| | | STALGKLQDVVNQNAQALNTLVKQLSSNFGAISSVLN |
| | | DILSRLDKVEAEVQIDRLITGRLQSLQTYVTQQLIRAAEIRASAN |
| | | LAATKMSECVLGQSKRVDFCGKGYHLMSFPQAAPH |
| | | GVVFLHVTYVPSQERNFTTAPAICHEGKAYFPREGVFVFNGTS |
| | | WFITQRNFFSPQIITTDNTFVSGNCDVVIGIINNTVY |
| | | DPLQPELDSFKEELDKYFKNHTSPDVDLGDISGINASVVNIQEE |
| | | IDRLNEVAKNLNESLIDLQELGKYEQYIKWPWYVWL |
| | | GFIAGLIAIVMVTILLCCMTSCCSCLKGACSCGSCCKFDEDDSE |
| | | PVLKGVKLHYT |
| 149 | SARS | MFIFLLFLTLTSGSDLDRCTTFDDVQAPNYTQHTSSMRGVYYP |
| | coronavirus | DEIFRSDTLYLTQDLFLPFYSNVTGFHTINHTFDNPV |
| | A013 | IPFKDGIYFAATEKSNVVRGWVFGSTMNNKSQSVIIINNSTNVV |
| | Spike | IRACNFELCDNPFFVVSKPMGTRTHTMIFDNAFNCT |
| | glycoprotein | FEYISDAFSLDVSEKSGNFKHLREFVFKNKDGFLYVYKGYQPI |
| | (GenBank: | DVVRDLPSGFNTLKPIFKLPLGINITNFRAILTAFSP |
| | AAV97985) | AQDTWGTSAAAYFVGYLKPTTFMLKYDENGTITDAVDCSQNP |
| | | LAELKCSVKSFEIDKGIYQTSNFRVVPSGDVVRFPNIT |
| | | NLCPFGEVFNATKFPSVYAWERKRISNCVADYSVLYNSTSFST |
| | | FKCYGVSATKLNDLCFSNVYADSFVVKGDDVRQIAPG |
| | | QTGVIADYNYKLPDDFMGCVLAWNTRNIDATSTGNYNYKYRY |
| | | LRHGKLRPFERDISNVPFSPDGKPCTPPAPNCYWPLRG |
| | | YGFYTTSGIGYQPYRVVVLSFELLNAPATVCGPKLSTDLIKNQ |
| | | CVNFNFNGLTGTGVLTPSSKRFQPFQQFGRDVSDFTD |
| | | SVRDPKTSEILDISPCSFGGVSVITPGTNASSEVAVLYQDVNCT |
| | | DVSTLIHAEQLTPAWRIYSTGNNVFQTQAGCLIGAE |
| | | HVDTSYECDIPIGAGICASYHTVSSLRSTSQKSIVAYTMSLGAD |
| | | SSIAYSNNTIAIPTNFSISITTEVMPVSMAKTSVDC |
| | | NMYICGDSTECANLLLQYGSFCRQLNRALSGIAAEQDRNTRE |
| | | VFVQVKQMYKTPTLKDFGGFNFSQILPDPLKPTKRSFI |
| | | EDLLFNKVTLADAGFMKQYGECLGDINARDLICAQKFNGLTVL |
| | | PPLLTDDMIAAYTAALVSGTATAGWTFGAGAALQIPF |
| | | AMQMAYRFNGIGVTQNVLYDNQKQIANQFNKAISQIQESLTTT |
| | | STALGKLQDVVNQNAQALNTLVKQLSSNFGAISSVLN |
| | | DILSRLDKVEAEVQIDRLITGRLQSLQTYVTQQLIRAAEIRASAN |
| | | LAATKMSECVLGQSKRVDFCGKGYHLMSFPQAAPH |
| | | GVVFLHVTYVPSQERNFTTAPAICHEGKAYFPREGVFVFNGTS |
| | | WFITQRNFFSPQIITTDNTFVSGNCDVVIGIINNTVY |
| | | DPLQPELDSFKEELDKYFKNHTSPDVDLGDISGINASVVNIQEE |
| | | IDRLNEVAKNLNESLIDLQELGKYEQYIKWPWYVWL |
| | | GFIAGLIAIVMVTILLCCMTSCCSCLKGACSCGSCCKFDEDDSE |
| | | PVLKGVKLHYT |
| 150 | SARS | MFIFLLFLTLTSGSDLDRCTTFDDVQAPNYTQHTSSMRGVYYP |
| | coronavirus | DEIFRSDTLYLTQDLFLPFYSNVTGFHTINHTFDNPV |
| | civet014 | IPFKDGIYFAATEKSNVVRGWVFGSTMNNKSQSVIIINNSTNVV |
| | Spike | IRACNFELCDNPFFVVSKPMGTQTHTMIFDNAFNCT |
| | glycoprotein | FEYISDAFSLDVSEKSGNFKHLREFVFKNKDGFLYVYKGYQPI |
| | (GenBank: | DVVRDLPSGFNTLKPIFKLPLGINITNFRAILTAFSP |
| | AAU04661) | AQDTWGTSAAAYFVGYLKPTTFMLKYDENGTITDAVDCSQNP |
| | | LAELKCSVKSFEIDKGIYQTSNFRVVPSGDVVRFPNIT |
| | | NLCPFGEVFNATKFPSVYAWERKRISNCVADYSVLYNSTSFST |
| | | FKCYGVSATKLNDLCFSNVYADSFVVKGDDVRQIAPG |
| | | QTGVIADYNYKLPDDFMGCVLAWNTRNIDATSTGNYNYKYRY |
| | | LRHGKLRPFERDISNVPFSPDGKPCTPPAPNCYWPLKG |
| | | YGFYTTSGIGYQPYRVVVLSFELLNAPATVCGPKLSTDLIKNQ |
| | | CVNFNFNGLTGTGVLTPSSKRFQPFQQFGRDVSDFTD |
| | | SVRDPKTSEILDISPCSFGGVSVITPGTNASSEVAVLYQDVNCT |
| | | DVSTLIHAEQLTPAWRIYSTGNNVFQTQAGCLIGAE |
| | | HVDTSYECDIPIGAGICASYHTVSSLRSTSQKSIVAYTMSLGAD |
| | | SSIAYSNNTIAIPTNFSISITTEVMPVSMAKTSVDC |
| | | NMYICGDSTECANLLLQYGSFCRQLNRALSGIAAEQDRNTRE |
| | | VFVQVKQMYKTPTLKDFGGFNFSQILPDPLKPTKRSFI |
| | | EDLLFNKVTLADAGFMKQYGECLGDINARDLICAQKFNGLTVL |
| | | PPLLTDDMIAAYTAALVSGTATAGWTFGAGAALQIPF |
| | | AMQMAYRFNGIGVTQNVLYENQKQIANQFNKAISQIQESLTTT |
| | | STALGKLQDVVNQNAQALNTLVKQLSSNFGAISSVLN |
| | | DILSRLDKVEAEVQIDRLITGRLQSLQTYVTQQLIRAAEIRASAN |
| | | LAATKMSECVLGQSKRVDFCGKGYHLMSFPQAAPH |
| | | GVVFLHVTYVPSQERNFTTAPAICHEGKAYFPREGVFVFNGTS |
| | | WFITQRNFFSPQIITTDNTFVSGNCDVVIGIINNTVY |
| | | DPLQPELDSFKEELDKYFKNHTSPDVDLGDISGINASVVNIQEE |
| | | IDRLNEVAKNLNESLIDLQELGKYEQYIKWPWYVWL |
| | | GFIAGLIAIVMVTILLCCMTSCCSCLKGACSCGSCCKFDEDDSE |
| | | PVLKGVKLHYT |
| 151 | SARS | MFIFLLFLTLTSGSDLDRCTTFDDVQAPNYTQHTSSMRGVYYP |
| | coronavirus | DEIFRSDTLYLTQDLFLPFYSNVTGFHTINHTFDNPV |
| | A001 | IPFKDGIYFAATEKSNVVRGWVFGSTMNNKSQSVIIINNSTNVV |
| | Spike | IRACNFELCDNPFFVVSKPMGTQTHTMIFDNAFNCT |
| | glycoprotein | FEYISDAFSLDVSEKSGNFKHLREFVFKNKDGFLYVYKGYQPI |
| | (GenBank: | DVVRDLPSGFNTLKPIFKLPLGINITNFRAILTAFSP |
| | AAV97984) | AQDTWGTSAAAYFVGYLKPTTFMLKYDENGTITDAVDCSQNP |
| | | LAELKCSVKSFEIDKGIYQTSNFRVVPSGDVVRFPNIT |
| | | NLCPFGEVFNATKFPSVYAWERKRISNCVADYSVLYNSTSFST |
| | | FKCYGVSATKLNDLCFSNVYADSFVVKGDDVRQIAPG |
| | | QTGVIADYNYKLPDDFMGCVLAWNTRNIDATSTGNYNYKXRY |
| | | LRHGKLRPFERDISNVPFSPXGKPCTPPAPNCYWPLRG |
| | | YGFYTTSGIGYQPYRVVVLSFELLNAPATVCGPKLSTDLIKNQ |
| | | CVNFNFNGLTGTGVLTPSSKRFQPFQQFGRDVSDFTD |
| | | SVRDPKTSEILDISPCSFGGVSVITPGTNASSEVAVLYQDVNCT |
| | | DVSTLIHAEQLTPAWRIYSTGNNVFQTQAGCLIGAE |
| | | HVDTSYECDIPIGAGICASYHTVSSLRSTSQKSIVAYTMSLGAD |
| | | SSIAYSNNTIAIPTNFSISITTEVMPVSMAKTSVDC |
| | | NMYICGDSTECANLLLQYGSFCRQLNRALSGIAAEQDRNTRE |
| | | VFVQVKQMYKTPTLKDFGGFNFSQILPDPLKPTKRSFI |
| | | EDLLFNKVTLADAGFMKQYGECLGDINARDLICAQKFNGLTVL |
| | | PPLLTDDMIAAYTAALVSGTATAGWTFGAGAALQIPF |
| | | AMQMAYRFNGIGVTQNVLYENQKQIANQFNKAISQIQESLTTT |
| | | STALGKLQDVVNQNAQALNTLVKQLSSNFGAISSVLN |
| | | DILSRLDKVEAEVQIDRLITGRLQSLQTYVTQQLIRAAEIRASAN |
| | | LAATKMSECVLGQSKRVDFCGKGYHLMSFPQAAPH |
| | | GVVFLHVTYVPSQERNFTTAPAICHEGKAYFPREGVFVFNGTS |
| | | WFITQRNFFSPQIITTDNTFVSGNCDVVIGIINNTVY |
| | | DPLQPELDSFKEELDKYFKNHTSPDVDLGDISGINASVVNIQEE |
| | | IDRLNEVAKNLNESLIDLQELGKYEQYIKWPWYVWL |
| | | GFIAGLIAIVMVTILLCCMTSCCSCLKGACSCGSCCKFDEDDSE |
| | | PVLKGVKLHYT |
| 152 | SARS | MFIFLLFLTLTSGSDLDRCTTFDDVQAPNYTQHTSSMRGVYYP |
| | coronavirus | DEIFRSDTLYLTQDLFLPFYSNVTGFHTINHTFDNPV |
| | C013 | IPFKDGIYFAATEKSNVVRGWVFGSTMNNKSQSVIIINNSTNVV |
| | Spike | IRACNFELCDNPFFVVSKPMGTQTHTMIFDNAFNCT |
| | glycoprotein | FEYISDAFSLDVSEKSGNFKHLREFVFKNKDGFLYVYKGYQPI |
| | (GenBank: | DVVRDLPSGFNTLKPIFKLPLGINITNFRAILTAFSP |
| | AAV97995) | AQDTWGTSAAAYFVGYLKPTTFMLKYDENGTITDAVDCSQNP |
| | | LAELKCSVKSFEIDKGIYQTSNFRVVPSGDVVRFPNIT |
| | | NLCPFGEVFNATKFPSVYAWERKRISNCVADYSVLYNSTSFST |
| | | FKCYGVSATKLNDLCFSNVYADSFVVKGDDVRQIAPG |
| | | QTGVIADYNYKLPDDFMGCVLAWNTRNIDATSTGNYNYKFRY |
| | | LRHGKLRPFERDISNVPFSPDGKPCTPPAPNCYWPLRG |
| | | YGFYTTSGIGYQPYRVVVLSFELLNAPATVCGPKLSTDLIKNQ |
| | | CVNFNFNGLTGTGVLTPSSKRFQPFQQFGRDVSDFTD |
| | | SVRDPKTSEILDISPCSFGGVSVITPGTNASSEVAVLYQDVNCT |
| | | DVSTLIHAEQLTPAWRIYSTGNNVFQTQAGCLIGAE |
| | | HVDTSYECDIPIGAGICASYHTVSSLRSTSQKSIVAYTMSLGAD |
| | | SSIAYSNNTIAIPTNFSISITTEVMPVSMAKTSVDC |
| | | NMYICGDSTECANLLLQYGSFCRQLNRALSGIAAEQDRNTRE |
| | | VFVQVKQMYKTPTLKDFGGFNFSQILPDPLKPTKRSFI |
| | | EDLLFNKVTLADAGFMKQYGECLGDINARDLICAQKFNGLTVL |
| | | PPLLTDDMIAAYTAALVSGTATAGWTFGAGAALQIPF |
| | | AMQMAYRFNGIGVTQNVLYENQKQIANQFNKAISQIQESLTTT |
| | | STALGKLQDVVNQNAQALNTLVKQLSSNFGAISSVLN |
| | | DILSRLDKVEAEVQIDRLITGRLQSLQTYVTQQLIRAAEIRASAN |
| | | LAATKMSECVLGQSKRVDFCGKGYHLMSFPQAAPH |
| | | GVVFLHVTYVPSQERNFTTAPAICHEGKAYFPREGVFVFNGTS |
| | | WFITQRNFFSPQIITTDNTFVSGNCDVVIGIINNTVY |
| | | DPLQPELDSFKEELDKYFKNHTSPDVDLGDISGINASVVNIQEE |
| | | IDRLNEVAKNLNESLIDLQELGKYEQYIKWPWYVWL |
| | | GFIAGLIAIVMVTILLCCMTSCCSCLKGACSCGSCCKFDEDDSE |
| | | PVLKGVKLHYT |
| 153 | SARS | MFIFLLFLTLTSGSDLDRCTTFDDVQAPNYTQHTSSMRGVYYP |
| | coronavirus | DEIFRSDTLYLTQDLFLPFYSNVTGFHTINHTFDNPV |
| | C029 | IPFKDGIYFAATEKSNVVRGWVFGSTMDNKSQSVIIINNSTNVV |
| | Spike | IRACNFELCDNPFFVVSKPMGTQTHTMIFDNAFNCT |
| | glycoprotein | FEYISDAFSLDVSEKSGNFKHLREFVFKNKDGFLYVYKGYQPI |
| | (GenBank: | DVVRDLPSGFNTLKPIFKLPLGINITNFRAILTAFSP |
| | AAV98002) | AQDTWGTSAAAYFVGYLKPTTFMLKYDENGTITDAVDCSQNP |
| | | LAELKCSVKSFEIDKGIYQTSNFRVVPSGDVVRFPNIT |
| | | NLCPFGEVFNATKFPSVYAWERKRISNCVADYSVLYNSTSFST |
| | | FKCYGVSATKLNDLCFSNVYADSFVVKGDDVRQIAPG |
| | | QTGVIADYNYKLPDDFMGCVLAWNTRNIDATSTGNYNYKYRY |
| | | LRHGKLRPFERDISNVPFSPDGKPCTPPAPNCYWPLRG |
| | | YGFYTTSGIGYQPYRVVVLSFELLNAPATVCGPKLSTDLIKNQ |
| | | CVNFNFNGLTGTGVLTPSSKRFQPFQQFGRDVSDFTD |
| | | SVRDPKTSEILDISPCSFGGVSVITPGTNASSEVAVLYQDVNCT |
| | | DVSTLIHAEQLTPAWRIYSTGNNVFQTQAGCLIGAE |
| | | HVDTSYECDIPIGAGICASYHTVSSLRSTSQKSIVAYTMSLGAD |
| | | SSIAYSNNTIAIPTNFSISITTEVMPVSMAKTSVDC |
| | | NMYICGDSTECANLLLQYGSFCRQLNRALSGIAAEQDRNTRE |
| | | VFVQVKQMYKTPTLKDFGGFNFSQILPDPLKPTKRSFI |
| | | EDLLFNKVTLADAGFMKQYGECLGDINARDLICAQKFNGLTVL |
| | | PPLLTDDMIAAYTAALVSGTATAGWTFGAGAALQIPF |
| | | AMQMAYRFNGIGVTQNVLYENQKQIANQFNKAISQIQESLTTT |
| | | STALGKLQDVVNQNAQALNTLVKQLSSNFGAISSVLN |
| | | DILSRLDKVEAEVQIDRLITGRLQSLQTYVTQQLIRAAEIRASAN |
| | | LAATKMSECVLGQSKRVDFCGKGYHLMSFPQAAPH |
| | | GVVFLHVTYVPSQERNFTTAPAICHEGKAYFPREGVFVFNGTS |
| | | WFITQRNFFSPQIITTDNTFVSGNCDVVIGIINNTVY |
| | | DPLQPELDSFKEELDKYFKNHTSPDVDLGDISGINASVVNIQEE |
| | | IDRLNEVAKNLNESLIDLQELGKYEQYIKWPWYVWL |
| | | GFIAGLIAIVMVTILLCCMTSCCSCLKGACSCGSCCKFDEDDSE |
| | | PVLKGVKLHYT |
| 154 | SARS | MFIFLLFLTLTSGSDLDRCTTFDDVQAPNYTQHTSSMRGVYYP |
| | coronavirus | DEIFRSDTLYLTQDLFLPFYSNVTGFHTINHTFDNPV |
| | civet019 | IPFKDGIYFAATEKSNVVRGWVFGSTMNNKSQSVIIINNSTNVV |
| | Spike | IRACNFELCDNPFFVVSKPMGTQTHTMIFDNAFNCT |
| | glycoprotein | FEYISDAFSLDVSEKSGNFKHLREFVFKNKDGFLYVYKGYQPI |
| | (GenBank: | DVVRDLPSGFNTLKPIFKLPLGINITNFRAILTAFSP |
| | AAU04662) | AQDTWGTSAAAYFVGYLKPTTFMLKYDENGTITDAVDCSQNP |
| | | LAELKCSVKSFEIDKGIYQTSNFRVVPSGDVVRFPNIT |
| | | NLCPFGEVFNATKFPSVYAWERKRISNCVADYSVLYNSTSFST |
| | | FKCYGVSATKLNDLCFSNVYADSFVVKGDDVRQIAPG |
| | | QTGVIADYNYKLPDDFMGCVLAWNTRNIDATSTGNYNYKYRY |
| | | LRHGKLRPFERDISNVPFSSDGKPCTPPAPNCYWPLRG |
| | | YGFYTTSGIGYQPYRVVVLSFELLNAPATVCGPKLSTDLIKNQ |
| | | CVNFNFNGLTGTGVLTPSSKRFQPFQQFGRDVSDFTD |
| | | SVRDPKTSEILDISPCSFGGVSVITPGTNASSEVAVLYQDVNCT |
| | | DVSTLIHAEQLTPAWRIYSTGNNVFQTQAGCLIGAE |
| | | HVDTSYECDIPIGAGICASYHTVSSLRSTSQKSIVAYTMSLGAD |
| | | SSIAYSNNTIAIPTNFSISITTEVMPVSMAKTSVDC |
| | | NMYICGDSTECANLLLQYGSFCRQLNRALSGIAAEQDRNTRE |
| | | VFVQVKQMYKTPTLKDFGGFNFSQILPDPLKPTKRSFI |
| | | EDLLFNKVTLADAGFMKQYGECLGDINARDLICAQKFNGLTVL |
| | | PPLLTDDMIAAYTAALVSGTATAGWTFGAGAALQIPF |
| | | AMQMAYRFNGIGVTQNVLYENQKQIANQFNKAISQIQESLTTT |
| | | STALGKLQDVVNQNAQALNTLVKQLSSNFGAISSVLN |
| | | DILSRLDKVEAEVQIDRLITGRLQSLQTYVTQQLIRAAEIRASAN |
| | | LAATKMSECVLGQSKRVDFCGKGYHLMSFPQAAPH |
| | | GVVFLHVTYVPSQERNFTTAPAICHEGKAYFPREGVFVFSGTS |
| | | WFITQRNFFSPQIITTDNTFVSGNCDVVIGIINNTVY |
| | | DPLQPELDSFKEELDKYFKNHTSPDVDLGDISGINASVVNIQEE |
| | | IDRLNEVAKNLNESLIDLQELGKYEQYIKWPWYVWL |
| | | GFIAGLIAIVMVTILLCCMTSCCSCLKGACSCGSCCKFDEDDSE |
| | | PVLKGVKLHYT |
| 155 | SARS | MFIFLLFLTLTSGSDLDRCTTFDDVQAPNYTQHTSSMRGVYYP |
| | coronavirus | DEIFRSDTLYLTQDLFLPFYSNVTGFHTINHTFDNPV |
| | A021 | IPFKDGIYFAATEKSNVVRGWVFGSTMNNKSQSVIIINNSTNVV |
| | Spike | IRACNFELCDNPFFVVSKPMGTQTHTMIFDNAFNCT |
| | glycoprotein | FEYISDAFSLDVSEKSGNFKHLREFVFKNKDGFLYVYKGYQPI |
| | (GenBank: | DVVRDLPSGFNTLKPIFKLPLGINITNFRAILTAFSP |
| | AAV97986) | AQGTWGTSAAAYFVGYLKPTTFMLKYDENGTITDAVDCSQNP |
| | | LAELKCSVKSFEIDKGIYQTSNFRVVPSGDVVRFPNIT |
| | | NLCPFGEVFNATKFPSVYAWERKRISNCVADYSVLYNSTSFST |
| | | FKCYGVSATKLNDLCFSNVYADSFVVKGDDVRQIAPG |
| | | QTGVIADYNYKLPDDFMGCVLAWNTRNIDATSTGNYNYKYRY |
| | | LRHGKLRPFERDISNVPFSPDGKPCTPPAPNCYWPLNG |
| | | YGFYTTSGIGYQPYRVVVLSFELLNAPATVCGPKLSTDLIKNQ |
| | | CVNFNFNGLTGTGVLTPSSKRFQPFQQFGRDVSDFTD |
| | | SVRDPKTSEILDISPCSFGGVSVITPGTNASSEVAVLYQDVNCT |
| | | DVSTVIHAEQLTPAWRIYSTGNNVFQTQAGCLIGAE |
| | | HVDTSYECDIPIGAGICASYHTVSSLRSTSQKSIVAYTMSLGAD |
| | | SSIAYSNNTIAIPTNFSISITTEVMPVSMAKTSVDC |
| | | NMYICGDSTECANLLLQYGSFCRQLNRALSGIAAEQDRNTRE |
| | | VFVQVKQMYKTPTLKDFGGFNFSQILPDPLKPTKRSFI |
| | | EDLLFNKVTLADAGFMKQYGECLGDINARDLICAQKFNGLTVL |
| | | PPLLTDDMIAAYTAALVSGTATAGWTFGAGAALQIPF |
| | | AMQMAYRFNGIGVTQNVLYENQKQIANQFNKAISQIQESLTTT |
| | | STALGKLQDVVNQNAQALNTLVKQLSSNFGAISSVLN |
| | | DILSRLDKVEAEVQIDRLITGRLQSLQTYVTQQLIRAAEIRASAN |
| | | LAATKMSECVLGQSKRVDFCGKGYHLMSFPQAAPH |
| | | GVVFLHVTYVPSQERNFTTAPAICHEGKAYFPREGVFVFSGTS |
| | | WFITQRNFFSPQIITTDNTFVSGNCDVVIGIINNTVY |
| | | DPLQPELDSFKEELDKYFKNHTSPDVDLGDISGINASVVNIQEE |
| | | IDRLNEVAKNLNESLIDLQELGKYEQYIKWPWYVWL |
| | | GFIAGLIAIVMVTILLCCMTSCCSCLKGACSCGSCCKFDEDDSE |
| | | PVLKGVKLHYT |
| 156 | SARS | MFIFLLFLTLTSGSDLDRCTTFDDVQAPNYTQHTSSMRGVYYP |
| | coronavirus | DEIFRSDTLYLTQDLFLPFYSNVTGFHTINHTFDNPV |
| | C018 | IPFKDGIYFAATEKSNVVRGWVFGSTMNNKSQSVIIINNSTNVV |
| | Spike | IRACNFELCDNPFFVVSKPMGTRTHTMIFDNAFNCT |
| | glycoprotein | FEYISDAFSLDVSEKSGNFKHLREFVFKNKDGFLYVYKGYQPI |
| | (GenBank: | DVVRDLPSGFNTLKPIFKLPLGINITNFRAILTAFSP |
| | AAV97998) | AQGTWGTSAAAYFVGYLKPTTFMLKYDENGTITDAVDCSQNP |
| | | LAELKCSVKSFEIDKGIYQTSNFRVVPSGDVVRFPNIT |
| | | NLCPFGEVFNATKFPSVYAWERKRISNCVADYSVLYNSTSFST |
| | | FKCYGVSATKLNDLCFSNVYADSFVVKGDDVRQIAPG |
| | | QTGVIADYNYKLPDDFMGCVLAWNTRNIDATSTGNYNYKYRY |
| | | LRHGKLRPFERDISNVPFSPDGKPCTPPAPNCYWPLRG |
| | | YGFYTTSGIGYQPYRVVVLSFELLNAPATVCGPKLSTDLIKNQ |
| | | CVNFNFNGLTGTGVLTPSSKRFQPFQQFGRDVSDFTD |
| | | SVRDPKTSEILDISPCSFGGVSVITPGTNASSEVAVLYQDVNCT |
| | | DVSTLIHAEQLTPAWRIYSTGNNVFQTQAGCLIGAE |
| | | HVDTSYECDIPIGAGICASYHTVSSLRSTSQKSIVAYTMSLGAD |
| | | SSIAYSNNTIAIPTNFSISITTEVMPVSMAKTSVDC |
| | | NMYICGDSTECANLLLQYGSFCRQLNRALSGIAAEQDRNTRE |
| | | VFVQVKQMYKTPTLKDFGGFNFSQILPDPLKPTKRSFI |
| | | EDLLFNKVTLADAGFMKQYGECLGDINARDLICAQKFNGLTVL |
| | | PPLLTDDMIAAYTAALVSGTATAGWTFGAGAALQIPF |
| | | AMQMAYRFNGIGVTQNVLYENQKQIANQFNKAISQIQESLTTT |
| | | STALGKLQDVVNQNAQALNTLVKQLSSNFGAISSVLN |
| | | DILSRLDKVEAEVQIDRLITGRLQSLQTYVTQQLIRAAEIRASAN |
| | | LAATKMSECVLGQSKRVDFCGKGYHLMSFPQAAPH |
| | | GVVFLHVTYVPFQERNFTTAPAICHEGKAYFPREGVFVFNGTS |
| | | WFITQRNFFSPQIITTDNTFVSGNCDVVIGIINNTVY |
| | | DPLQPELDSFKEELDKYFKNHTSPDVDLGDISGINASVVNIQEE |
| | | IDRLNEVAKNLNESLIDLQELGKYEQYIKWPWYVWL |
| | | GFIAGLIAIVMVTILLCCMTSCCSCLKGACSCGSCCKFDEDDSE |
| | | PVLKGVKLHYT |
| 157 | SARS | MFIFLLFLTLTSGSDLDRCTTFDDVQAPNYTQHTSSMRGVYYP |
| | coronavirus | DEIFRSDTLYLTQDLFLPFYSNVTGFHTINHTFDNPV |
| | B024 | IPFKDGIYFAATEKSNVVRGWVFGSTMNNKSQSVIIINNSTNVV |
| | Spike | IRACNFELCDNPFFVVSKPMGTQTHTMIFDNAFNCT |
| | glycoprotein | FEYISDAFSLDVSEKSGNFKHLREFVFKNKDGFLYVYKGYQPI |
| | (GenBank: | DVVRDLPSGFNTLKPIFKLPLGIKITNFRAILTAFSP |
| | AAV97990) | AQGTWGTSAAAYFVGYLKPTTFMLKYDENGTITDAVDCSQNP |
| | | LAELKCSVKSFEIDKGIYQTSNFRVVPSGDVVRFPNIT |
| | | NLCPFGEVFNATKFPSVYAWERKRISNCVADYSVLYNSTSFST |
| | | FKCYGVSATKLNDLCFSNVYADSFVVKGDDVRQIAPG |
| | | QTGVIADYNYKLPDDFMGCVLAWNTRNIDATSTGNYNYKYRY |
| | | LRHGKLRPFERDISNVPFSPDGKPCTPPAPNCYWPLNG |
| | | YGFYTTSGIGYQPYRVVVLSFELLNAPATVCGPKLSTDLIKNQ |
| | | CVNFNFNGLTGTGVLTPSSKRFQPFQQFGRDVSDFTD |
| | | SVRDPKTSEILDISPCSFGGVSVITPGTNASSEVAVLYQDVNCT |
| | | DVSTLIHADQLTPAWRIYSTGNNVFQTQAGCLIGAE |
| | | HVDTSYECDIPIGAGICASYHTVSSLRSTSQKSIVAYTMSLGAD |
| | | SSIAYSNNTIAIPTNFSISITTEVMPVSMAKTSVDC |
| | | NMYICGDSTECANLLLQYGSFCRQLNRALSGIAAEQDRNTRE |
| | | VFVQVKQMYKTPTLKDFGGFNFSQILPDPLKPTKRSFI |
| | | EDLLFNKVTLADAGFMKQYGECLGDINARDLICAQKFNGLTVL |
| | | PPLLTDDMIAAYTAALVSGTATAGWTFGAGAALQIPF |
| | | AMQMAYRFNGIGVTQNVLYENQKQIANQFNKAISQIQESLTTT |
| | | STALGKLQDVVNQNAQALNTLVKQLSSNFGAISSVLN |
| | | DILSRLDKVEAEVQIDRLITGRLQSLQTYVTQQLIRAAEIRASAN |
| | | LAATKMSECVLGQSKRVDFCGKGYHLMSFPQAAPH |
| | | GVVFLHVTYVPFQERNFTTAPAICHEGKAYFPREGVFVFNGTS |
| | | WFITQRNFFSPQIITTDNTFVSGNCDVVIGIINNTVY |
| | | DPLQPELDSFKEELDKYFKNHTSPDVDLGDISGINASVVNIQEE |
| | | IDRLNEVAKNLNESLIDLQELGKYEQYIKWPWYVWL |
| | | GFIAGLIAIVMVTILLCCMTSCCSCLKGACSCGSCCKFDEDDSE |
| | | PVLKGVKLHYT |
| 158 | SARS | MFIFLLFLTLTSGSDLDRCTTFDDVQAPNYTQHTSSMRGVYYP |
| | coronavirus | DEIFRSDTLYLTQDLFLPFYSNVTGFHTINHTFDNPV |
| | C025 | IPFKDGIYFAATEKSNVVRGWVFGSTMNNKSQSVIIINNSTNVV |
| | Spike | IRACNFELCDNPFFVVSKPMGTQTHTMIFDNAFNCT |
| | glycoprotein | FEYISDAFSLDVSEKSGNFKHLREFVFKNKDGFLYVYKGYQPI |
| | (GenBank: | DVVRDLPSGFNTLKPIFKLPLGIKITNFRAILTAFSP |
| | AAV98000) | AQGTWGTSAAAYFVGYLKPTTFMLKYDENGTITDAVDCSQNP |
| | | LAELKCSVKSFEIDKGIYQTSNFRVVPSGDVVRFPNIT |
| | | NLCPFGEVFNATKFPSVYAWERKRISNCVADYSVLYNSTSFST |
| | | FKCYGVSATKLNDLCFSNVYADSFVVKGDDVRQIAPG |
| | | QTGVIADYNYKLPDDFMGCVLAWNTRNIDATSTGNYNYKYRY |
| | | LRHGKLRPFERDISNVPFSPDGKPCTPPAPNCYWPLRG |
| | | YGFYTTSGIGYQPYRVVVLSFELLNAPATVCGPKLSTDLIKNQ |
| | | CVNFNFNGLTGTGVLTPSSKRFQPFQQFGRDVSDFTD |
| | | SVRDPKTSEILDISPCSFGGVSVITPGTNASSEVAVLYQDVNCT |
| | | DVSTLIHAEQLTPAWRIYSTGNNVFQTQAGCLIGAE |
| | | HVDSSYECDIPIGAGICASYHTVSSLRSTSQKSIVAYTMSLGAD |
| | | SSIAYSNNTIAIPTNFSISITTEVMPVSMAKTSVDC |
| | | NMYICGDSTECANLLLQYGSFCRQLNRALSGIAAEQDRNTRE |
| | | VFVQVKQMYKTPTLKDFGGFNFSQILPDPLKPTKRSFI |
| | | EDLLFNKVTLADAGFMKQYGECLGDINARDLICAQKFNGLTVL |
| | | PPLLTDDMIAAYTAALVSGTATAGWTFGAGAALQIPF |
| | | AMQMAYRFNGIGVTQNVLYENQKQIANQFNKAISQIQESLTTT |
| | | STALGKLQDVVNQNAQALNTLVKQLSSNFGAISSVLN |
| | | DILSRLDKVEAEVQIDRLITGRLQSLQTYVTQQLIRAAEIRASAN |
| | | LAATKMSECVLGQSKRVDFCGKGYHLMSFPQAAPH |
| | | GVVFLHVTYVPSQERNFTTAPAICHEGKAYFPREGVFVFNGTS |
| | | WFITQRNFFSPQIITTDNTFVSGNCDVVIGIINNTVY |
| | | DPLQPELDSFKEELDKYFKNHTSPDVDLGDISGINASVVNIQEE |
| | | IDRLNEVAKNLNESLIDLQELGKYEQYIKWPWYVWL |
| | | GFIAGLIAIVMVTILLCCMTSCCSCLKGACSCGSCCKFDEDDSE |
| | | PVLKGVKLHYT |
| 159 | SARS | MFIFLLFLTLTSGSDLDRCTTFDDVQAPNYTQHTSSMRGVYYP |
| | coronavirus | DEIFRSDTLYLTQDLFLPFYSNVTGFHTINHTFDNPV |
| | civet010 | IPFKDGIYFAATEKSNVVRGWVFGSTMNNKSQSVIIINNSTNVV |
| | Spike | IRACNFELCDNPFFVVSKPMGTQTHTMIFDNAFNCT |
| | glycoprotein | FEYISDAFSLDVSEKSGNFKHLREFVFKNKDGFLYVYKGYQPI |
| | (GenBank: | DVVRDLPSGFNTLKPIFKLPLGIKITNFRAILTAFSP |
| | AAU04649) | AQGTWGTSAAAYFVGYLKPTTFMLKYDENGTITDAVDCSQNP |
| | | LAELKCSVKSFEIDKGIYQTSNFRVVPSGDVVRFPNIT |
| | | NLCPFGEVFNATKFPSVYAWERKRISNCVADYSVLYNSTSFST |
| | | FKCYGVSATKLNDLCFSNVYADSFVVKGDDVRQIAPG |
| | | QTGVIADYNYKLPDDFMGCVLAWNTRNIDATSTGNYNYKYRY |
| | | LRHGKLRPFERDISNVPFSSDGKPCTPPAPNCYWPLRG |
| | | YGFYTTSGIGYQPYRVVVLSFELLNAPATVCGPKLSTDLIKNQ |
| | | CVNFNFNGLTGTGVLTPSSKRFQPFQQFGRDVSDFTD |
| | | SVRDPKTSEILDISPCSFGGVSVITPGTNASSEVAVLYQDVNCT |
| | | DVSTLIHAEQLTPAWRIYSTGNNVFQTQAGCLIGAE |
| | | HVDTSYECDIPIGAGICASYHTVSSLRSTSQKSIVAYTMSLGAD |
| | | SSIAYSNNTIAIPTNFSISITTEVMPVSMAKTSVDC |
| | | NMYICGDSTECANLLLQYGSFCRQLNRALSGIAAEQDRNTRE |
| | | VFVQVKQMYKTPTLKDFGGFNFSQILPDPLKPTKRSFI |
| | | EDLLFNKVTLADAGFMKQYGECLGDINARDLICAQKFNGLTVL |
| | | PPLLTDDMIAAYTAALVSGTATAGWTFGAGAALQIPF |
| | | AMQMAYRFNGIGVTQNVLYENQKQIANQFNKAISQIQESLTTT |
| | | STALGKLQDVVNQNAQALNTLVKQLSSNFGAISSVLN |
| | | DILSRLDKVEAEVQIDRLITGRLQSLQTYVTQQLIRAAEIRASAN |
| | | LAATKMSECVLGQSKRVDFCGKGYHLMSFPQAAPH |
| | | GVVFLHVTYVPSQERNFTTAPAICHEGKAYFPREGVFVFNGTS |
| | | WFITQRNFFSPQIITTDNTFVSGNCDVVIGIINNTVY |
| | | DPLQPELDSFKEELDKYFKNHTSPDVDLGDISGINASVVNIQEE |
| | | IDRLNEVAKNLNESLIDLQELGKYEQYIKWPWYVWL |
| | | GFIAGLIAIVMVTILLCCMTSCCSCLKGACSCGSCCKFDEDDSE |
| | | PVLKGVKLHYT |
| 160 | Civet SARS | MFIFLLFLTLTSGSDLDRCTTFDDVQAPNYTQHTSSMRGVYYP |
| | CoV 007/2004 | DEIFRSDTLYLTQDLFLPFYSNVTGFHTINHTFDNPV |
| | Spike | IPFKDGIYFAATEKSNVVRGWVFGSTMNNKSQSVIIINNSTNVV |
| | glycoprotein | IRACNFELCDNPFFVVSKPMGTQTHTMIFDNAFNCT |
| | (GenBank: | FEYISDAFSLDVSEKSGNFKHLREFVFKNKDGFLYVYKGYQPI |
| | AAU04646) | DVVRDLPSGFNTLKPIFKLPLGIKITNFRAILTAFSP |
| | | AQGTWGTSAAAYFVGYLKPTTFMLKYDENGTITDAVDCSQNP |
| | | LAELKCSVKSFEIDKGIYQTSNFRVVPSGDVVRFPNIT |
| | | NLCPFGEVFNATKFPSVYAWERKRISNCVADYSVLYNSTSFST |
| | | FKCYGVSATKLNDLCFSNVYADSFVVKGDDVRQIAPG |
| | | QTGVIADYNYKLPDDFMGCVLAWNTRNIDATSTGNYNYKYRY |
| | | LRHGKLRPFERDISNVPFSSDGKPCTPPAPNCYWPLRG |
| | | YGFYTTSGIGYQPYRVVVLSFELLNAPATVCGPKLSTDLIKNQ |
| | | CVNFNFNGLTGTGVLTPSSKRFQPFQQFGRDVSDFTD |
| | | SVRDPKTSEILDISPCSFGGVSVITPGTNASSEVAVLYQDVNCT |
| | | DVSTLIHAEQLTPAWRIYSTGNNVFQTQAGCLIGAE |
| | | HVDTSYECDIPIGAGICASYHTVSSLRSTSQKSIVAYTMSLGAD |
| | | SSIAYSNNTIAIPTNFSISITTEVMPVSMAKTSVDC |
| | | NMYICGDSTECANLLLQYGSFCRQLNRALSGIAAEQDRNTRE |
| | | VFVQVKQMYKTPTLKDFGGFNFSQILPDPLKPTKRSFI |
| | | EDLLFNKVTLADAGFMKQYGECLGDINARDLICAQKFNGLTVL |
| | | PPLLTDDMIAAYTAALVSGTATAGWTFGAGAALQIPF |
| | | AMQMAYRFNGIGVTQNVLYENQKQIANQFNKAISQIQESLTTT |
| | | STALGKLQDVVNQNAQALNTLVKQLSSNFGAISSVLN |
| | | DILSRLDKVEAEVQIDRLITGRLQSLQTYVTQQLIRAAEIRASAN |
| | | LAATKMSECVLGQSKRVDFCGKGYHLMSFPQAAPH |
| | | GVVFLHVTYVPSQERNFTTAPAICHEGKAYFPREGVFVFSGTS |
| | | WFITQRNFFSPQIITTDNTFVSGNCDVVIGIINNTVY |
| | | DPLQPELDSFKEELDKYFKNHTSPDVDLGDISGINASVVNIQEE |
| | | IDRLNEVAKNLNESLIDLQELGKYEQYIKWPWYVWL |
| | | GFIAGLIAIVMVTILLCCMTSCCSCLKGACSCGSCCKFDEDDSE |
| | | PVLKGVKLHYT |
| 161 | SARS | MFIFLLFLTLTSGSDLDRCTTFDDVQAPNYTQHTSSMRGVYYP |
| | coronavirus | DEIFRSDTLYLTQDLFLPFYSNVTGFHTINHTFDNPV |
| | A022 | IPFKDGIYFAATEKSNVVRGWVFGSTMNNKSQSVIIINNSTNVV |
| | Spike | IRACNFELCDNPFFVVSKPMGTQTHTMIFDNAFNCT |
| | glycoprotein | FEYISDAFSLDVSEKSGNFKHLREFVFKNKDGFLYVYKGYQPI |
| | (GenBank: | DVVRDLPSGFNTLKPIFKLPLGIKITNFRAILTAFSP |
| | AAV91631) | AQGTWGTSAAAYFVGYLKPTTFMLKYDENGTITDAVDCSQNP |
| | | LAELKCSVKSFEIDKGIYQTSNFRVVPSGDVVRFPNIT |
| | | NLCPFGEVFNATKFPSVYAWERKRISNCVADYSVLYNSTSFST |
| | | FKCYGVSATKLNDLCFSNVYADSFVVKGDDVRQIAPG |
| | | QTGVIADYNYKLPDDFMGCVLAWNTRNIDATSTGNYNYKYRY |
| | | LRHGKLRPFERDISNVPFSSDGKPCTPPAPNCYWPLRG |
| | | YGFYTTSGIGYQPYRVVVLSFELLNAPATVCGPKLSTDLIKNQ |
| | | CVNFNFNGLTGTGVLTPSSKRFQPFQQFGRDVSDFTD |
| | | SVRDPKTSEILDISPCSFGGVSVITPGTNASSEVAVLYQDVNCT |
| | | DVSTLIHAEQLTPAWRIYSTGNNVFQTQAGCLIGAE |
| | | HVDTSYECDIPIGAGICASYHTVSSLRSTSQKSIVAYTMSLGAD |
| | | SSIAYSNNTIAIPTNFSISITTEVMPVSMAKTSVDC |
| | | NMYICGDSTECANLLLQYGSFCRQLNRALSGIAAEQDRNTRE |
| | | VFVQVKQMYKTPTLKDFGGFNFSQILPDPLKPTKRSFI |
| | | EDLLFNKVTLADAGFMKQYGQCLGDINARDLICAQKFNGLTVL |
| | | PPLLTDDMIAAYTAALVSGTATAGWTFGAGAALQIPF |
| | | AMQMAYRFNGIGVTQNVLYENQKQIANQFNKAISQIQESLTTT |
| | | STALGKLQDVVNQNAQALNTLVKQLSSNFGAISSVLN |
| | | DILSRLDKVEAEVQIDRLITGRLQSLQTYVTQQLIRAAEIRASAN |
| | | LAATKMSECVLGQSKRVDFCGKGYHLMSFPQAAPH |
| | | GVVFLHVTYVPSQERNFTTAPAICHEGKAYFPREGVFVFSGTS |
| | | WFITQRNFFSPQIITTDNTFVSGNCDVVIGIINNTVY |
| | | DPLQPELDSFKEELDKYFKNHTSPDVDLGDISGINASVVNIQEE |
| | | IDRLNEVAKNLNESLIDLQELGKYEQYIKWPWYVWL |
| | | GFIAGLIAIVMVTILLCCMTSCCSCLKGACSCGSCCKFDEDDSE |
| | | PVLKGVKLHYT |
| 162 | SARS | MFIFLLFLTLTSGSDLDRCTTFDDVQAPNYTQHTSSMRGVYYP |
| | coronavirus | DEIFRSDTLYLTQDLFLPFYSNVTGFHTINHTFDNPV |
| | GD01 | IPFKDGIYFAATEKSNVVRGWVFGSTMNNKSQSVIIINNSTNVV |
| | Spike | IRACNFELCDNPFFAVSKPMGTQTHTMIFDNAFNCT |
| | glycoprotein S | FEYISDAFSLDVSEKSGNFKHLREFVFKNKDGFLYVYKGYQPI |
| | (GenBank: | DVVRDLPSGFNTLKPIFKLPLGINITNFRAILTAFLP |
| | AAP51227) | AQDTWGTSAAAYFVGYLKPTTFMLKYDENGTITDAVDCSQNP |
| | | LAELKCSVKSFEIDKGIYQTSNFRVVPSRDVVRFPNIT |
| | | NLCPFGEVFNATKFPSVYAWERKRISNCVADYSVLYNSTFFST |
| | | FKCYGVSATKLNDLCFSNVYADSFVVKGDDVRQIAPG |
| | | QTGVIADYNYKLPDDFMGCVLAWNTRNIDATSTGNYNYKYRY |
| | | LRHGKLRPFERDISNVPFSPDGKPCTPPALNCYWPLND |
| | | YGFYTTTGIGYQPYRVVVLSYELLNAPATVCGPKLSTDLIKNQ |
| | | CVNFNFNGLTGTGVLTPSSKRFQPFQQFGRDVSDFTD |
| | | SVRDPKTSEILDISPCSFGGVSVITPGTNASSEVAVLYQDVNCT |
| | | DVSTAIHADQLTPAWRIYSTGNNVFQTQAGCLIGAE |
| | | HVDTSYECDIPIGAGICASYHTVSLLRSTSQKSIVAYTMSLGAD |
| | | SSIAYSNNTIAIPTNFSISITTEVMPVSMAKTSVDC |
| | | NMYICGDSTECANLLLQYGSFCTQLNRALSGIAAEQDRNTREV |
| | | FAQVKQMYKTPTLKDFGGFNFSQILPDPLKSTKRSFI |
| | | EDLLFNKVTLADAGFMKQYGECLGDINARDLICAQKFNGLTVL |
| | | PPLLTDDMIAAYTAALVSGTATAGWTFGAGAALQIPF |
| | | AMQMAYRFNGIGVTQNVLYENQKQIANQFNKAISQIQESLTTT |
| | | STALGKLQDVVNQNAQALNTLVKQLSSNFGAISSVLN |
| | | DILSRLDKVEAEVQIDRLITGRLQSLQTYVTQQLIRAAEIRASAN |
| | | LAATKMSECVLGQSKRVDFCGKGYHLMSFPQAAPH |
| | | GVVFLHVTYVPSQERNFTTAPAICHEGKAYFPREGVFVFNGTS |
| | | WFITQRNFFSPQIITTDNTFVSGNCDVVIGIINNTVY |
| | | DPLQPELDSFKEELDKYFKNHTSPDVDLGDISGINASVVNIQKE |
| | | IDRLNEVAKNLNESLIDLQELGKYEQYIKWPWYVWL |
| | | GFIAGLIAIVMVTILLCCMTSCCSCLKGACSCGSCCKFDEDDSE |
| | | PVLKGVKLHYT |
| 163 | SARS | MFIFLLFLTLTSGSDLDRCTTFDDVQAPNYTQHTSSMRGVYYP |
| | coronavirus | DEIFRSDTLYLTQDLFLPFYSNVTGFHTINHTFDNPV |
| | GZ02 | IPFKDGIYFAATEKSNVVRGWVFGSTMNNKSQSVIIINNSTNVV |
| | Spike | IRACNFELCDNPFFAVSKPMGTQTHTMIFDNAFNCT |
| | glycoprotein | FEYISDAFSLDVSEKSGNFKHLREFVFKNKDGFLYVYKGYQPI |
| | (GenBank: | DVVRDLPSGFNTLKPIFKLPLGINITNFRAILTAFLP |
| | AAS00003) | AQDTWGTSAAAYFVGYLKPTTFMLKYDENGTITDAVDCSQNP |
| | | LAELKCSVKSFEIDKGIYQTSNFRVVPSRDVVRFPNIT |
| | | NLCPFGEVFNATKFPSVYAWERKRISNCVADYSVLYNSTFFST |
| | | FKCYGVSATKLNDLCFSNVYADSFVVKGDDVRQIAPG |
| | | QTGVIADYNYKLPDDFMGCVLAWNTRNIDATSTGNYNYKYRY |
| | | LRHGKLRPFERDISNVPFSPDGKPCTPPALNCYWPLND |
| | | YGFYTTTGIGYQPYRVVVLSFELLNAPATVCGPKLSTDLIKNQC |
| | | VNFNFNGLTGTGVLTPSSKRFQPFQQFGRDVSDFTD |
| | | SVRDPKTSEILDISPCSFGGVSVITPGTNASSEVAVLYQDVNCT |
| | | DVSTAIHADQLTPAWRIYSTGNNVFQTQAGCLIGAE |
| | | HVDTSYECDIPIGAGICASYHTVSLLRSTSQKSIVAYTMSLGAD |
| | | SSIAYSNNTIAIPTNFSISITTEVMPVSMAKTSVDC |
| | | NMYICGDSTECANLLLQYGSFCTQLNRALSGIAAEQDRNTREV |
| | | FAQVKQMYKTPTLKDFGGFNFSQILPDPLKPTKRSFI |
| | | EDLLFNKVTLADAGFMKQYGECLGDINARDLICAQKFNGLTVL |
| | | PPLLTDDMIAAYTAALVSGTATAGWTFGAGAALQIPF |
| | | AMQMAYRFNGIGVTQNVLYENQKQIANQFNKAISQIQESLTTT |
| | | STALGKLQDVVNQNAQALNTLVKQLSSNFGAISSVLN |
| | | DILSRLDKVEAEVQIDRLITGRLQSLQTYVTQQLIRAAEIRASAN |
| | | LAATKMSECVLGQSKRVDFCGKGYHLMSFPQAAPH |
| | | GVVFLHVTYVPSQERNFTTAPAICHEGKAYFPREGVFVFNGTS |
| | | WFITQRNFFSPQIITTDNTFVSGNCDVVIGIINNTVY |
| | | DPLQPELDSFKEELDKYFKNHTSPDVDLGDISGINASVVNIQEE |
| | | IDRLNEVAKNLNESLIDLQELGKYEQYIKWPWYVWL |
| | | GFIAGLIAIVMVTILLCCMTSCCSCLKGACSCGSCCKFDEDDSE |
| | | PVLKGVKLHYT |
| 164 | SARS-CoV | MFIFLFFLTLVSGSDLDRCTTFDDVQAPNYTQHTSSMRGVYYP |
| | spike protein | DEIFRSDTLYLTQDLFLPFYSNVTGFHTINHTFDNPVIPFKDGIY |
| | with foldon and | FAATEKSNVVRGWVFGSTMNNKSQSVIIINNSTNVVIRACNFE |
| | linker | LCDNPFFAVSKPMGTQTHTMIFDNAFNCTFEYISDAFSLDVSE |
| | | KSGNFKHLREFVFKNKDGFLYVYKGYQPIDVVRDLPSGFNTLK |
| | | PIFKLPLGINITNFRAILTAFSPAQDTWGTSAAAYFVGYLKPTTF |
| | | MLKYDENGTITDAVDCSQNPLAELKCSVKSFEIDKGIYQTSNF |
| | | RVVPSGDVVRFPNITNLCPFGEVFNATKFPSVYAWERKKISNC |
| | | VADYSVLYNSTFFSTFKCYGVSATKLNDLCFSNVYADSFVVKG |
| | | DDVRQIAPGQTGVIADYNYKLPDDFMGCVLAWNTRNIDATST |
| | | GNYNYKYRYLRHGKLRPFERDISNVPFSPDGKPCTPPALNCY |
| | | WPLNDYGFYTTTGIGYQPYRVVVLSFELLNAPATVCGPKLSTD |
| | | LIKNQCVNFNFNGLTGTGVLTPSSKRFQPFQQFGRDVSDFTD |
| | | SVRDPKTSEILDISPCSFGGVSVITPGTNASSEVAVLYQDVNCT |
| | | DVSTAIHADQLTPAWRIYSTGNNVFQTQAGCLIGAEHVDTSYE |
| | | CDIPIGAGICASYHTVSLLRSTSQKSIVAYTMSLGADSSIAYSNN |
| | | TIAIPTNFSISITTEVMPVSMAKTSVDCNMYICGDSTECANLLLQ |
| | | YGSFCTQLNRALSGIAAEQDRNTREVFAQVKQMYKTPTLKYF |
| | | GGFNFSQILPDPLKPTKRSFIEDLLFNKVTLADAGFMKQYGEC |
| | | LGDINARDLICAQKFNGLTVLPPLLTDDMIAAYTAALVSGTATA |
| | | GWTFGAGAALQIPFAMQMAYRFNGIGVTQNVLYENQKQIANQ |
| | | FNKAISQIQESLTTTSTALGKLQDVVNQNAQALNTLVKQLSSNF |
| | | GAISSVLNDILSRLDPPEAEVQIDRLITGRLQSLQTYVTQQLIRA |
| | | AEIRASANLAATKMSECVLGQSKRVDFCGKGYHLMSFPQAAP |
| | | HGVVFLHVTYVPSQERNFTTAPAICHEGKAYFPREGVFVFNG |
| | | TSWFITQRNFFSPQIITTDNTFVSGNCDVVIGIINNTVYDPLQPE |
| | | LDSFKEELDKYFKNHTSPDVDLGDISGINASVVNIQKEIDRLNE |
| | | VAKNLNESLIDLQELGKYEQYIKWP |
| | | LVPRGSGYIPEAPRDGQAYVRKDGEWVLLSTFLLEHHHHHHH |
| | | HHH |
| 165 | Artificial | MFIFLFFLTLVSGSTIEKCTTFDDVQPPNYTQFLSSHRGVYYPD |
| | Sarbecovirus | DIFRSDVLHLTQDHFLPFDSNVTGFITFGLNFDNPIIPFKDGIYF |
| | spike | AATEKSNVIRGWVFGSTMNNKSQSVIIMNNSTNVVIRACNFEL |
| | consensus 4 | CDNPFFAVSKPNNTQIPSYIFNNAFNCTFEYVSDDFNLDVGEK |
| | with foldon and | PGNFKHLREFVFKNKDGFLYVYSGYQPIDVASGLPSGFNALKP |
| | linker | IFKLPLGINITNFRTLLTAFPPRPDYWGTSAAAYFVGYLKPTTF |
| | | MLKYDENGTITDAVDCSQNPLAELKCSVKSFEIDKGIYQTSNF |
| | | RVAPSKEVVRFPNITNLCPFGEVFNATTFPSVYAWERKRISNC |
| | | VADYSVLYNSTSFSTFKCYGVSATKLNDLCFSNVYADSFVVKG |
| | | DDVRQIAPGQTGVIADYNYKLPDDFMGCVLAWNTRNIDATST |
| | | GNYNYKYRSLRHGKLRPFERDISNVPFSPDGKPCTPPAFNCY |
| | | WPLNDYGFFTTNGIGYQPYRVVVLSFELLNAPATVCGPKLSTD |
| | | LIKNQCVNFNFNGLTGTGVLTPSSKRFQPFQQFGRDVSDFTD |
| | | SVRDPKTSEILDISPCSFGGVSVITPGTNTSSEVAVLYQDVNCT |
| | | DVPVAIHADQLTPAWRVYSTGNNVFQTQAGCLIGAEHVDTSY |
| | | ECDIPIGAGICASYHTVSSLRSTSQKSIVAYTMSLGADSSIAYS |
| | | NNTIAIPTNFSISITTEVMPVSMAKTSVDCNMYICGDSTECANLL |
| | | LQYGSFCTQLNRALSGIAVEQDRNTREVFAQVKQMYKTPTLK |
| | | DFGGFNFSQILPDPLKPTKRSFIEDLLFNKVTLADAGFMKQYG |
| | | ECLGDINARDLICAQKFNGLTVLPPLLTDDMIAAYTAALVSGTA |
| | | TAGWTFGAGAALQIPFAMQMAYRFNGIGVTQNVLYENQKQIA |
| | | NQFNKAISQIQESLTTTSTALGKLQDVVNQNAQALNTLVKQLS |
| | | SNFGAISSVLNDILSRLDPPEAEVQIDRLITGRLQSLQTYVTQQ |
| | | LIRAAEIRASANLAATKMSECVLGQSKRVDFCGKGYHLMSFPQ |
| | | AAPHGVVFLHVTYVPSQERNFTTAPAICHEGKAYFPREGVFVF |
| | | NGTSWFITQRNFFSPQIITTDNTFVSGSCDVVIGIINNTVYDPLQ |
| | | PELDSFKEELDKYFKNHTSPDVDLGDISGINASVVNIQKEIDRL |
| | | NEVAKNLNESLIDLQELGKYEQYIKWPLVPRGSGYIPEAPRDG |
| | | QAYVRKDGEWVLLSTFLLEHHHHHHHHHH |

[0099] FIG. 2 illustrates a plurality of consensus sequences formed from various sequences listed above.

[0100] In various embodiments, the consensus sequence includes an amino acid sequence set forth in SEQ ID NO:4.

[0101] In various embodiments, the consensus sequence includes an amino acid sequence set forth in SEQ ID NOs: 77 to 163.

[0102] In various embodiments, the consensus sequence includes amino acid 303 to 571 of the amino acid sequence set forth in SEQ ID NOs: 77 to 163.

[0103] In various embodiments, the consensus sequence includes an amino acid sequence set forth in SEQ ID NO:4 and SEQ ID NOs:53 to 62 or any combination thereof.

[0104] In various embodiments, the consensus sequence includes an amino acid sequence set forth in SEQ ID NO:4 and SEQ ID NOs:53 to 62 or any combination thereof.

[0105] In various embodiments, the consensus sequence includes an amino acid sequence set forth in SEQ ID NO:4, SEQ ID NOs:53 to 62, and SEQ ID NOs:63 to 65 or any combination thereof.

[0106] In various embodiments, the consensus sequence includes an amino acid sequence set forth in SEQ ID NO:7 and SEQ ID NOs:66 to 74. or any combination thereof.

[0107] In various embodiments, the consensus sequence includes an amino acid sequence set forth in SEQ ID NO:7.

[0108] In various embodiments, the consensus sequence includes an amino acid sequence set forth in SEQ ID NO:7, SEQ ID NOs:66 to 74, and SEQ ID NOs:75 to 76 or any combination thereof.

[0109] In various embodiments, the consensus sequence includes an amino acid sequence set forth in SEQ ID NO:4, SEQ ID NOs:53 to 62, SEQ ID NOs:63 to 65, SEQ ID NOs:7, SEQ ID NOs:66-74, and SEQ ID NOs:75 to 76 or any combination thereof.

[0110] In various embodiments, the consensus sequence includes an amino acid sequence set forth in SEQ ID NO:1 and SEQ ID NOs:23-35 or any combination thereof.

[0111] In various embodiments, the consensus sequence includes an amino acid sequence set forth in SEQ ID NO:1, SEQ ID NOs:23-35, and SEQ ID NOs:36-38 or any combination thereof.

[0112] In various embodiments, the consensus sequence includes an amino acid sequence set forth in SEQ ID NO:2 and SEQ ID NOs:39 to 50 or any combination thereof.

[0113] In various embodiments, the consensus sequence includes an amino acid sequence set forth in SEQ ID NO:2, SEQ ID NOs:39-50 and SEQ ID NOs:51 to 52 or any combination thereof.

[0114] In various embodiments, the consensus sequence includes an amino acid sequence set forth in SEQ ID NO:1, SEQ ID NO:2, SEQ ID NOs:23-35, SEQ ID NOs:36-38, SEQ ID NOs:39-50 and SEQ ID NOs:51 to 52 or any combination thereof.

[0115] In various embodiments, the sarbecovirus is selected from the group comprising of SARS-CoV, SARS-CoV-2, SARS-CoV-2 B.1.1.7, SARS-CoV-2 B.1.351, SC2r-CoV RaTG13, SC2r-CoV GX-P5L, and SARS-CoV combined variants of concern (VOC).

[0116] FIG. 3 illustrates the methodology used to generate the consensus sequences.

[0117] It is to be appreciated that the terms SARS1r hACE2/batACE2 Spike, SARS1r hACE2 Spike, SARS2r hACE2 Spike, SARS2r hACE2/batACE2 Spike, SARS1 r/SARS2r hACE2 Spike, or SARS1 r/SARS2r hACE2/batACE2 Spike are references to SEQ ID NOs. 23 to 52.

[0118] It is to be appreciated that the terms SARS1r hACE RBD, SARS1r hACE2/batACE2 RBD, SARS2r hACE2 RBD, SARS2r hACE/batACE2 RBD, SARS1 r/SARS2r hACE2 RBD, or SARS1 r/SARS2r hACE2/batACE2 RBD are references to SEQ ID NOs. 53 to 76.

[0119] It is to be appreciated that the terms SARS-CoV VOC or SARS-CoV-2 VOC are references to SEQ ID NOs: 77 to 163.

[0120] The method to generate consensus sequence from a genotype of sarbecovirus comprises: a) obtaining sarbecovirus spike protein sequences (except for human SARS-CoV2) directly from NCBI protein database and processing in R (v4.0.2) to filter complete protein sequences or by determining the corresponding nucleic acid using a genomic database such as GISAID genome and; b) retrieving and processing GISAID SARS-CoV2 spike protein mutation report in R (v4.0.2) with in-house script to calculate the highest frequency mutation per position using a microprocessor; c) producing the SARS-CoV2 reference and combined variants of concern (VOC) sequence (for example SARS-CoV-2 B.1.1.7, and/or SARS-CoV-2 B.1.351); d) after redundancy removal using CD-hit (v4.8.1), importing 163 unique spike and 81 unique RBD sequences into a microprocessor such as Geneious Prime (v2021.0) for further analysis; d) conducting protein alignment using MAFFT and plotting a phylogeny tree using PhyML; e) inferring the human ACE2, batACE2 and non-ACE2 lineages from the RBD phylogeny tree and validating with experimental evidence and literature search; and f) generating consensus sequences for RBD and non-RBD regions according to the highest frequency per amino acid position in the lineage and combining the initial sequences to establish 8 consensus sequences.

[0121] It is to be appreciated that the effect of the SARS survivors vaccinated with Pfizer-BioNTech mRNA SARS-CoV-2 vaccine BNT162b2 would be similar to using the consensus sequences generated in the present disclosure. Therefore, for the purposes of the following examples, they provide an example of how the amino acid constructs will work.

### Example 1: Human Serum Panel Studies were Conducted

[0122] The four serum panels included in this study were described as below. (1) SARS patient (n=11): these were sera collected from SARS survivors in Singapore at different time points (2003, 2012 and 2020) before the vaccination program started in February 2021; (2) COVID-19 patient (n=40): this group of sera was collected during 2020 as part of a national longitudinal study [19]. (3) Healthy-vaccinated (n=20): these were sera collected at day 14 after second dose (or 35 days after the first dose) of the Pfizer-BioNTech BNT162b2 mRNA vaccine. (4) SARS-vaccinated (n=9): sera taken from SARS survivors 21-62 days post first vaccination.

[0123] FIG. 4 shows a surrogate virus neutralization test (sVNT), which allowed rapid and multiplex determination of Nabs

[0124] We have further improved the sVNT in two aspects: 1) we have immobilized the viral RBD on a solid phase (a magnetic bead) and used a PE-ACE2 to measure the virus-receptor binding (FIG. 5) which allowed multiplex detection of NAbs against different sarbecoviruses; 2) we have expanded the RBD proteins to six different viruses. As shown in FIG. 5, multiplex sVNT on the Luminex platform shows all six RBD proteins are able to bind the hACE2 receptor molecular as expected in the following order (from high to low affinity): SARS-CoV-2 B.1.351>SARS-CoV-2 B.1.1.7=SC2r-CoV GX-P5L (pangolin)>SARS-CoV-2>SARS-CoV>SC2r-CoV RaTG13 (bat).

Multiplex sVNT Based on RBD from Six Different Sarbecoviruses

[0125] AviTag-biotinylated RBDs were coated on the MagPlex Avidin microsphere (Luminex) at 5 μg/1 million beads. In multiplex sVNT, RBD-coated microspheres (600 beads/antigen) were pre-incubated with serum at a final 1:20 or greater for 1 h at 37° C. with 800 rpm agitation. After 1 h incubation, 50 μl of PE-conjugated hACE2 (GenScript, 1000 ng/ml) were added to the well and incubated for 30 min at 37° C. with agitation, followed by two PBS-1% BSA washes. The data were acquired using MAGPIX system.

[0126] FIG. 6 shows multiplex sVNT on six different RBDs (from left to right: SARS-CoV-2 WT, UK, SA strains; Bat virus RaTG13; Pangolin virus GX-P5L; SARS-CoV). A). SARS patient. B) COVID-19 patient. C) Healthy-vaccinated. Serum samples were taken two weeks after second dose. D) SARS-vaccinated. All serum samples were tested at a single dilution of 1:20. A cut-off of 30% was set as previously determined.

[0127] The cross-NAb data demonstrated two highly important observations: The first observation is that vaccinated SARS survivors produced very high NAbs against all viruses studied (Panel D), even against the bat and pangolin viruses; and the second observation is that they neutralized the SARS-CoV-2 variants better than the naïve individuals who received the normal two doses (Panel C).

[0128] The SARS patients had minimal cross-NAbs to any of the other five viruses before vaccination (Panel A) whereas the COVID-19 patients had cross-NAbs against other viruses (all of them are SARS-CoV-2 related), they did not have much against the SARS-CoV (Panel B).

[0129] Using serial dilutions, the best performance of pan-sarbecovirus cross-neutralization by the SARS-vaccinated group have been illustrated.

[0130] FIG. 7 shows titration of neutralizing antibody levels (NT50) in the different groups against the six sarbecoviruses. Serum samples were tested at dilutions from 1:20 to 1:20480 by a 4-fold serial titration. SAR-vaccinated shows highest log NT50 titer values against all six sarbecoviruses.

### Example 2: Mouse Studies

### Pan-Sarbecovirus mAb Inhibition Assay

[0131] RBD-coated microspheres (600 beads/antigen) were pre-incubated with 1:100 diluted serum for 1 h at 37° C. with agitation. Unbound antibodies were removed by two PBS-1% BSA washes. Pan-sarbecovirus mAbs (1000 ng/ml) were then added, followed by 1 h incubation at 37° C. with agitation followed by washing. The binding of the pan-sarbecovirus mAb on RBD was detected by PE-conjugated anti-mouse IgG antibodies. The data were acquired using MAGPIX system.

[0132] As shown in FIG. 8A, the mAb is able to neutralize all six viruses, albeit with slightly lower efficacy against GX-P5L. Using a blocking assay, same principle as the sVNT by replacing the PE-hACE2 with the mAb, we have determined the ability of the four different serum panels to block the mAb's ability in neutralization (FIG. 8B).

[0133] It should be appreciated that that the cross-neutralizing ability of the SARS-vaccinated group is the best among the four groups. Second, during natural infection (for either SARS and COVID-19), there is minimal activation of cross-neutralizing antibodies across the two lineages representing SC2r-CoVs and SARS-CoV. Third, although the mRNA vaccination boosted overall neutralizing ability against SCr2-CoVs, it had minimal impact on cross-neutralization against SARS-CoV.

### Example 3: Rabbit studies

[0134] Multiplex sVNT analysis using rabbit hyper immune sera targeting RBD of six different beta coronaviruses

[0135] The rabbit anti-RBD sera were produced by commercial contract with GenScript Biotech. The testing was conducted essentially the same as those described for the mouse studies. Rabbit sera were used by a 4-fold serial dilution starting at 1:20.

[0136] FIG. 9 shows neutralization patterns from rabbit hyper immune sera targeting different beta coronavirus RBD proteins. The data presented in FIG. 9 demonstrates that cross-neutralization is limited only to the strain/lineage level among the five SC2r-CoVs. There is no cross-neutralization between SC2r-CoV and SARS-CoV and the negative control HKU1 did not neutralize any virus/strain as shown. The data confirms the virus/strain-specific immunodominant antibody using rabbit hyper immune serum targeting specific virus/strain similar to the results as shown for human serum panel and mouse studies.

[0137] In should be appreciated that the amino acid constructs as mentioned herein above and in FIG. 2 may be used to form rabbit anti-amino acid construct sera or rabbit anti-consensus sequence sera to test against the six different sarbecoviruses used in the mouse studies above or the six different beta coronaviruses used in the Rabbit studies above.

### Example 4 Vaccination with Exemplary Protein

[0138] The protein listed in SEQ ID No. 165 (a modified version of SEQ ID No. 13, with foldon and linker) was administered in 25 μg with Sigma Adjuvant System (S6322) in 2 doses 21 days apart. Contemporaneously, a second dosage regime of a first dose of the protein listed in SEQ ID No. 165 (a modified version of SEQ ID No. 13, with foldon and linker) was administered with Sigma adjuvant followed by a second dose of the Sinovac's vaccine alone. The serum from these the dosed subjects was extracted for RBD challenge.

[0139] Using 20 RBD from different sarbecovirus were coated on separate microspheres. Each of the 20 RBD coated microspheres (600 beads/antigen) were pre-incubated with 1:100 diluted serum for 1 h at 37° C. with agitation. Unbound antibodies were removed by two PBS-1% BSA washes. The subject serum (1000 ng/ml) were then added, followed by 1 h incubation at 37° C. with agitation followed by washing. The binding of any antibodies formed in the subjects on the various RBD was detected by PE-conjugated anti-mouse IgG antibodies. The data were acquired using MAGPIX system.

[0140] The two doses of the protein listed in SEQ ID No. 165 (a modified version of SEQ ID No. 13, with foldon and linker) administered with a Sigma adjuvant overall induced higher titre across all 20 RBD challenges carried out compared to the dosage regime of a first dose of the protein listed in SEQ ID No. 165 (a modified version of SEQ ID No. 13, with foldon and linker) administered with Sigma adjuvant followed by a second dose of the Sinovac's vaccine alone (See FIG. 10).

[0141] The same experiment was repeated using RBD from 20 different sarbecovirus and strains including the new variants of concern. As can be seen in FIG. 11, the two doses of the protein (25 μg) listed in SEQ ID No. 165 (a modified version of SEQ ID No. 13, with foldon and linker) administered with Sigma adjuvant overall induced higher titre across all 20 tested RBD compared to a first dose of the protein listed in SEQ ID No. 165 (a modified version of SEQ ID No. 13, with foldon and linker) administered with a Sigma adjuvant followed by a second dose of the Sinovac's vaccine alone.

### Example 5 Booster with Exemplary Protein

[0142] Separate dosage regimens were compared: the first being 3 doses of the Pfizer BioNTech vaccine; the second being 2 doses of the Pfizer BioNTech vaccine followed by a dose of 25 μg of the protein listed in SEQ ID No. 165 (a modified version of SEQ ID No. 13, with foldon and linker) administered with Sigma adjuvant; the third being 2 doses of the Pfizer BioNTech vaccine followed by a dose of 1 μg of the protein listed in SEQ ID No. 165 (a modified version of SEQ ID No. 13, with foldon and linker); the fourth being 2 doses of the Pfizer BioNTech vaccine followed by a dose of saline; and the final being 3 doses of saline.

[0143] As can be seen in FIG. 12, 2 doses of the Pfizer BioNTech vaccine followed by a dose of the protein listed in SEQ ID No. 165 (a modified version of SEQ ID No. 13, with foldon and linker) administered either with or without the Sigma adjuvant all the clade 1 sarbecovirus were inhibited more than 3 doses with the Pfizer BioNTech vaccine both at 7 and 14 days after dose three.

[0144] Separate dosage regimens were compared: the first being 3 doses of the Moderna vaccine; the second being 2 doses of the Moderna vaccine followed by a dose of 25 μg of the protein listed in SEQ ID No. 165 (a modified version of SEQ ID No. 13, with foldon and linker) administered with Sigma adjuvant; the third being 2 doses of the Moderna vaccine followed by a dose of 1 μg of the protein listed in SEQ ID No. 165 (a modified version of SEQ ID No. 13, with foldon and linker); the fourth being 2 doses of the Moderna vaccine followed by a dose of saline; and the final being 3 doses of saline.

[0145] As can be seen in FIG. 13, 2 doses of the Pfizer BioNTech vaccine followed by a dose of the protein listed in SEQ ID No. 165 (a modified version of SEQ ID No. 13, with foldon and linker) administered either with or without the Sigma adjuvant all the clade 1 sarbecovirus were inhibited more than 3 doses with the Pfizer BioNTech vaccine both at 7 and 14 days after dose three.

[0146] Separate dosage regimens were compared: the first being 3 doses of the Sinovac vaccine; the second being 2 doses of the Sinovac vaccine followed by a dose of 25 μg of the protein listed in SEQ ID No. 164 (a modified version of SEQ ID No. 1 with foldon and linker sequence) administered with Sigma adjuvant; the third being 2 doses of the Sinovac vaccine followed by a dose of 25 μg of the protein listed in SEQ ID No. 165 (a modified version of SEQ ID No. 13 with foldon and linker sequence) administered with Sigma adjuvant; the fourth being 2 doses of the Sinovac vaccine followed by a dose of 1 μg of the protein listed in SEQ ID No. 165 (a modified version of SEQ ID No. 13 with foldon and linker sequence); and the final being 3 doses of saline.

[0147] As can be seen in FIG. 14, 2 doses of the Sinovac vaccine followed by a dose of the protein listed in the protein listed in SEQ ID No. 165 (a modified version of SEQ ID No. 13 with foldon and linker sequence) administered either with or without the Sigma adjuvant all the clade 1 sarbecovirus were inhibited more than 3 doses with the Sinovac vaccine both at 7 and 14 days after dose three. 2 doses of the Sinovac vaccine followed by a dose of the protein listed in the protein listed in SEQ ID No. 165 (a modified version of SEQ ID No. 13 with foldon and linker sequence) administered with the Sigma adjuvant all the clade 1 and clade2 sarbecovirus were inhibited more than 2 doses of the Sinovac vaccine followed by a dose of the protein listed in the protein listed in SEQ ID No. 164 (a modified version of SEQ ID No. 1 with foldon and linker sequence) administered with the Sigma adjuvant both at 7 and 14 days after dose three. This result reflected the better booster effect of SEQ ID No. 13 than the natural SARS-CoV-1 shown as SEQ ID No.1 as the same modifications of foldon and linker were applied in SEQ ID No.165 and SEQ ID No.164.

[0148] It should be appreciated by the person skilled in the art that the above invention is not limited to the embodiment described. It is appreciable that modifications and improvements may be made without departing from the scope of the present invention.

[0149] It should be further appreciated by the person skilled in the art that one or more of the above modifications or improvements, not being mutually exclusive, may be further combined to form yet further embodiments of the present invention.

The application's sequence listing, which the Patent Office published only in electronic form, follows.

SEQUENCE LISTING (165 sequences)

SEQ ID NO: 1 - protein, 1255 aa, Unknown
  SARS-CoV spike protein
MFIFLLFLTLTSGSDLDRCTTFDDVQAPNYTQHTSSMRGVYYPDEIFRSDTLYLTQDLFLPFYSNVTGFHTINHTFDNPVIPFKDGIYFAATEKSNVVRGWVFGSTMNNKSQSVIIINNSTNVVIRACNFELCDNPFFAVSKPMGTQTHTMIFDNAFNCTFEYISDAFSLDVSEKSGNFKHLREFVFKNKDGFLYVYKGYQPIDVVRDLPSGFNTLKPIFKLPLGINITNFRAILTAFSPAQDTWGTSAAAYFVGYLKPTTFMLKYDENGTITDAVDCSQNPLAELKCSVKSFEIDKGIYQTSNFRVVPSGDVVRFPNITNLCPFGEVFNATKFPSVYAWERKKISNCVADYSVLYNSTFFSTFKCYGVSATKLNDLCFSNVYADSFVVKGDDVRQIAPGQTGVIADYNYKLPDDFMGCVLAWNTRNIDATSTGNYNYKYRYLRHGKLRPFERDISNVPFSPDGKPCTPPALNCYWPLNDYGFYTTTGIGYQPYRVVVLSFELLNAPATVCGPKLSTDLIKNQCVNFNFNGLTGTGVLTPSSKRFQPFQQFGRDVSDFTDSVRDPKTSEILDISPCSFGGVSVITPGTNASSEVAVLYQDVNCTDVSTAIHADQLTPAWRIYSTGNNVFQTQAGCLIGAEHVDTSYECDIPIGAGICASYHTVSLLRSTSQKSIVAYTMSLGADSSIAYSNNTIAIPTNFSISITTEVMPVSMAKTSVDCNMYICGDSTECANLLLQYGSFCTQLNRALSGIAAEQDRNTREVFAQVKQMYKTPTLKYFGGFNFSQILPDPLKPTKRSFIEDLLFNKVTLADAGFMKQYGECLGDINARDLICAQKFNGLTVLPPLLTDDMIAAYTAALVSGTATAGWTFGAGAALQIPFAMQMAYRFNGIGVTQNVLYENQKQIANQFNKAISQIQESLTTTSTALGKLQDVVNQNAQALNTLVKQLSSNFGAISSVLNDILSRLDKVEAEVQIDRLITGRLQSLQTYVTQQLIRAAEIRASANLAATKMSECVLGQSKRVDFCGKGYHLMSFPQAAPHGVVFLHVTYVPSQERNFTTAPAICHEGKAYFPREGVFVFNGTSWFITQRNFFSPQIITTDNTFVSGNCDVVIGIINNTVYDPLQPELDSFKEELDKYFKNHTSPDVDLGDISGINASVVNIQKEIDRLNEVAKNLNESLIDLQELGKYEQYIKWPWYVWLGFIAGLIAIVMVTILLCCMTSCCSCLKGACSCGSCCKFDEDDSEPVLKGVKLHYT

SEQ ID NO: 2 - protein, 1282 aa, Unknown
  SARS-CoV-2 spike protein
MFLLTTKRTMFVFLVLLPLVSSQCVNLTTRTQLPPAYTNSFTRGVYYPDKVFRSSVLHSTQDLFLPFFSNVTWFHAIHVSGTNGTKRFDNPVLPFNDGVYFASTEKSNIIRGWIFGTTLDSKTQSLLIVNNATNVVIKVCEFQFCNDPFLGVYYHKNNKSWMESEFRVYSSANNCTFEYVSQPFLMDLEGKQGNFKNLREFVFKNIDGYFKIYSKHTPINLVRDLPQGFSALEPLVDLPIGINITRFQTLLALHRSYLTPGDSSSGWTAGAAAYYVGYLQPRTFLLKYNENGTITDAVDCALDPLSETKCTLKSFTVEKGIYQTSNFRVQPTESIVRFPNITNLCPFGEVFNATRFASVYAWNRKRISNCVADYSVLYNSASFSTFKCYGVSPTKLNDLCFTNVYADSFVIRGDEVRQIAPGQTGKIADYNYKLPDDFTGCVIAWNSNNLDSKVGGNYNYLYRLFRKSNLKPFERDISTEIYQAGSTPCNGVEGFNCYFPLQSYGFQPTNGVGYQPYRVVVLSFELLHAPATVCGPKKSTNLVKNKCVNFNFNGLTGTGVLTESNKKFLPFQQFGRDIADTTDAVRDPQTLEILDITPCSFGGVSVITPGTNTSNQVAVLYQDVNCTEVPVAIHADQLTPTWRVYSTGSNVFQTRAGCLIGAEHVNNSYECDIPIGAGICASYQTQTNSPRRARSVASQSIIAYTMSLGAENSVAYSNNSIAIPTNFTISVTTEILPVSMTKTSVDCTMYICGDSTECSNLLLQYGSFCTQLNRALTGIAVEQDKNTQEVFAQVKQIYKTPPIKDFGGFNFSQILPDPSKPSKRSFIEDLLFNKVTLADAGFIKQYGDCLGDIAARDLICAQKFNGLTVLPPLLTDEMIAQYTSALLAGTITSGWTFGAGAALQIPFAMQMAYRFNGIGVTQNVLYENQKLIANQFNSAIGKIQDSLSSTASALGKLQDVVNQNAQALNTLVKQLSSNFGAISSVLNDILSRLDKVEAEVQIDRLITGRLQSLQTYVTQQLIRAAEIRASANLAATKMSECVLGQSKRVDFCGKGYHLMSFPQSAPHGVVFLHVTYVPAQEKNFTTAPAICHDGKAHFPREGVFVSNGTHWFVTQRNFYEPQIITTDNTFVSGNCDVVIGIVNNTVYDPLQPELDSFKEELDKYFKNHTSPDVDLGDISGINASVVNIQKEIDRLNEVAKNLNESLIDLQELGKYEQYIKWPWYIWLGFIAGLIAIVMVTIMLCCMTSCCSCLKGCCSCGSCCKFDEDDSEPVLKGVKLHYT

SEQ ID NO: 3 - protein, 654 aa, Unknown
  SARS-CoV spike protein S1 subunit
SDLDRCTTFDDVQAPNYTQHTSSMRGVYYPDEIFRSDTLYLTQDLFLPFYSNVTGFHTINHTFDNPVIPFKDGIYFAATEKSNVVRGWVFGSTMNNKSQSVIIINNSTNVVIRACNFELCDNPFFAVSKPMGTQTHTMIFDNAFNCTFEYISDAFSLDVSEKSGNFKHLREFVFKNKDGFLYVYKGYQPIDVVRDLPSGFNTLKPIFKLPLGINITNFRAILTAFSPAQDTWGTSAAAYFVGYLKPTTFMLKYDENGTITDAVDCSQNPLAELKCSVKSFEIDKGIYQTSNFRVVPSGDVVRFPNITNLCPFGEVFNATKFPSVYAWERKKISNCVADYSVLYNSTFFSTFKCYGVSATKLNDLCFSNVYADSFVVKGDDVRQIAPGQTGVIADYNYKLPDDFMGCVLAWNTRNIDATSTGNYNYKYRYLRHGKLRPFERDISNVPFSPDGKPCTPPALNCYWPLNDYGFYTTTGIGYQPYRVVVLSFELLNAPATVCGPKLSTDLIKNQCVNFNFNGLTGTGVLTPSSKRFQPFQQFGRDVSDFTDSVRDPKTSEILDISPCSFGGVSVITPGTNASSEVAVLYQDVNCTDVSTAIHADQLTPAWRIYSTGNNVFQTQAGCLIGAEHVDTSYECDIPIGAGICASYHTVSLLR

SEQ ID NO: 4 - protein, 222 aa, Unknown
  SARS-CoV spike protein RBD
RVVPSGDVVRFPNITNLCPFGEVFNATKFPSVYAWERKKISNCVADYSVLYNSTFFSTFKCYGVSATKLNDLCFSNVYADSFVVKGDDVRQIAPGQTGVIADYNYKLPDDFMGCVLAWNTRNIDATSTGNYNYKYRYLRHGKLRPFERDISNVPFSPDGKPCTPPALNCYWPLNDYGFYTTTGIGYQPYRVVVLSFELLNAPATVCGPKLSTDLIKNQCVNF

SEQ ID NO: 5 - protein, 673 aa, Unknown
  SARS-CoV-2 spike protein S1 subunit
SQCVNLTTRTQLPPAYTNSFTRGVYYPDKVFRSSVLHSTQDLFLPFFSNVTWFHAIHVSGTNGTKRFDNPVLPFNDGVYFASTEKSNIIRGWIFGTTLDSKTQSLLIVNNATNVVIKVCEFQFCNDPFLGVYYHKNNKSWMESEFRVYSSANNCTFEYVSQPFLMDLEGKQGNFKNLREFVFKNIDGYFKIYSKHTPINLVRDLPQGFSALEPLVDLPIGINITRFQTLLALHRSYLTPGDSSSGWTAGAAAYYVGYLQPRTFLLKYNENGTITDAVDCALDPLSETKCTLKSFTVEKGIYQTSNFRVQPTESIVRFPNITNLCPFGEVFNATRFASVYAWNRKRISNCVADYSVLYNSASFSTFKCYGVSPTKLNDLCFTNVYADSFVIRGDEVRQIAPGQTGKIADYNYKLPDDFTGCVIAWNSNNLDSKVGGNYNYLYRLFRKSNLKPFERDISTEIYQAGSTPCNGVEGFNCYFPLQSYGFQPTNGVGYQPYRVVVLSFELLHAPATVCGPKKSTNLVKNKCVNFNFNGLTGTGVLTESNKKFLPFQQFGRDIADTTDAVRDPQTLEILDITPCSFGGVSVITPGTNTSNQVAVLYQDVNCTEVPVAIHADQLTPTWRVYSTGSNVFQTRAGCLIGAEHVNNSYECDIPIGAGICASYQTQTNSPRRAR

SEQ ID NO: 6 - protein, 223 aa, Unknown
  SARS-CoV-2 spike protein RBD
RVQPTESIVRFPNITNLCPFGEVFNATRFASVYAWNRKRISNCVADYSVLYNSASFSTFKCYGVSPTKLNDLCFTNVYADSFVIRGDEVRQIAPGQTGKIADYNYKLPDDFTGCVIAWNSNNLDSKVGGNYNYLYRLFRKSNLKPFERDISTEIYQAGSTPCNGVEGFNCYFPLQSYGFQPTNGVGYQPYRVVVLSFELLHAPATVCGPKKSTNLVKNKCVNF

SEQ ID NO: 7 - protein, 200 aa, Unknown
  SARS-CoV-2 spike protein RBD
PNITNLCPFGEVFNATRFASVYAWNRKRISNCVADYSVLYNSASFSTFKCYGVSPTKLNDLCFTNVYDSFVIRGDEVRQIAPGQTGKIADYNYKLPDDFTGCVIAWNSNNLDSKVGGNYNYLYRLFRKSNLKPFERDISTEIYQAGSTPCNGVEGFNCYFPLQSYGFQPTNGVGYQPYRVVVLSFELLHAPATVCGPKKS

SEQ ID NO: 8 - protein, 710 aa, Unknown
  SARS-CoV-2 spike protein S1 subunit
MLLVNQSHQGFNKEHTSKMVSAIVLYVLLAAAAHSAFAQCVNLTTRTQLPPAYTNSFTRGVYYPDKVFRSSVLHSTQDLFLPFFSNVTWFHAIHVSGTNGTKRFDNPVLPFNDGVYFASTEKSNIIRGWIFGTTLDSKTQSLLIVNNATNVVIKVCEFQFCNDPFLGVYYHKNNKSWMESEFRVYSSANNCTFEYVSQPFLMDLEGKQGNFKNLREFVFKNIDGYFKIYSKHTPINLVRDLPQGFSALEPLVDLPIGINITRFQTLLALHRSYLTPGDSSSGWTAGAAAYYVGYLQPRTFLLKYNENGTITDAVDCALDPLSETKCTLKSFTVEKGIYQTSNFRVQPTESIVRFPNITNLCPFGEVFNATRFASVYAWNRKRISNCVADYSVLYNSASFSTFKCYGVSPTKLNDLCFTNVYADSFVIRGDEVRQIAPGQTGKIADYNYKLPDDFTGCVIAWNSNNLDSKVGGNYNYLYRLFRKSNLKPFERDISTEIYQAGSTPCNGVEGFNCYFPLQSYGFQPTNGVGYQPYRVVVLSFELLHAPATVCGPKKSTNLVKNKCVNFNFNGLTGTGVLTESNKKFLPFQQFGRDIADTTDAVRDPQTLEILDITPCSFGGVSVITPGTNTSNQVAVLYQDVNCTEVPVAIHADQLTPTWRVYSTGSNVFQTRAGCLIGAEHVNNSYECDIPIGAGICASYQTQTNSPRRAR

SEQ ID NO: 9 - protein, 203 aa, Unknown
  SARS-CoV spike protein RBD
MNITNLCPFGEVFNATKFPSVYAWERKKISNCVADYSVLYNSTFFSTFKCYGVSATKLNDLCFSNVYADSFVVKGDDVRQIAPGQTGVIADYNYKLPDDFMGCVLAWNTRNIDATSTGNYNYKYRYLRHGKLRPFERDISNVPFSPDGKPCTPPALNCYWPLNDYGFYTTTGIGYQPYRVVVLSFELLNAPATYLSLNTAAAL

SEQ ID NO: 10 - protein, 1255 aa, Artificial Sequence
  Artificial Sarbecovirus spike consensus 1
MFIFLFFLTLVSGSTIEKCTTFDDVQPPNYTQFLSSHRGVYYPDDIFRSDVLHLTQDHFLPFDSNVTGFITFGLNFDNPIIPFKDGIYFAATEKSNVIRGWVFGSTMNNKSQSVIIMNNSTNVVIRACNFELCDNPFFAVSKPNNTQIPSYIFNNAFNCTFEYVSDDFNLDVGEKPGNFKHLREFVFKNKDGFLYVYSGYQPIDVASGLPSGFNALKPIFKLPLGINITNFRTLLTAFPPRPDYWGTSAAAYFVGYLKPTTFMLKYDENGTITDAVDCSQNPLAELKCSVKSFEIDKGIYQTSNFRVVPSGDVVRFPNITNLCPFGEVFNATKFPSVYAWERKRISNCVADYSVLYNSTFFSTFKCYGVSATKLNDLCFSNVYADSFVVKGDDVRQIAPGQTGVIADYNYKLPDDFMGCVLAWNTRNIDATSTGNYNYKYRYLRHGKLRPFERDISNVPFSPDGKPCTPPALNCYWPLNDYGFYTTTGIGYQPYRVVVLSFELLNAPATVCGPKLSTDLIKNQCVNFNFNGLTGTGVLTPSSKRFQPFQQFGRDVSDFTDSVRDPKTSEILDISPCSFGGVSVITPGTNTSSEVAVLYQDVNCTDVPVAIHADQLTPAWRVYSTGNNVFQTQAGCLIGAEHVDTSYECDIPIGAGICASYHTVSSLRSTSQKSIVAYTMSLGADSSIAYSNNTIAIPTNFSISITTEVMPVSMAKTSVDCNMYICGDSTECANLLLQYGSFCTQLNRALSGIAVEQDRNTREVFAQVKQMYKTPTLKDFGGFNFSQILPDPLKPTKRSFIEDLLFNKVTLADAGFMKQYGECLGDINARDLICAQKFNGLTVLPPLLTDDMIAAYTAALVSGTATAGWTFGAGAALQIPFAMQMAYRFNGIGVTQNVLYENQKQIANQFNKAISQIQESLTTTSTALGKLQDVVNQNAQALNTLVKQLSSNFGAISSVLNDILSRLDPPEAEVQIDRLITGRLQSLQTYVTQQLIRAAEIRASANLAATKMSECVLGQSKRVDFCGKGYHLMSFPQAAPHGVVFLHVTYVPSQERNFTTAPAICHEGKAYFPREGVFVFNGTSWFITQRNFFSPQIITTDNTFVSGSCDVVIGIINNTVYDPLQPELDSFKEELDKYFKNHTSPDVDLGDISGINASVVNIQKEIDRLNEVAKNLNESLIDLQELGKYEQYIKWPWYVWLGFIAGLIAIVMVTILLCCMTSCCSCLKGACSCGSCCKFDEDDSEPVLKGVKLHYT

SEQ ID NO: 11 - protein, 1255 aa, Artificial Sequence
  Artificial Sarbecovirus spike consensus 2
MFIFLLFFTLTSGSDLDRCTTFDDVQAPNYTQHTSSMRGVYYPDEIFRSDTLYLTQDLFLPFYSNVTGFHTINHTFDNPVIPFKDGIYFAATEKSNVVRGWVFGSTMNNKSQSVIIINNSTNVVIRACNFELCDNPFFVVSKPMGTRTHTMIFDNAFNCTFEYISDAFSLDVSEKSGNFKHLREFVFKNKDGFLYVYKGYQPIDVVRDLPSGFNTLKPIFKLPLGIKITNFRAILTAFSPAQGTWGTSAAAYFVGYLKPTTFMLKYDENGTITDAVDCSQNPLAELKCSVKSFEIDKGIYQTSNFRVVPSGDVVRFPNITNLCPFGEVFNATKFPSVYAWERKRISNCVADYSVLYNSTSFSTFKCYGVSATKLNDLCFSNVYADSFVVKGDDVRQIAPGQTGVIADYNYKLPDDFMGCVLAWNTRNIDATSTGNHNYKYRYLRHGKLRPFERDISNVPFSPDGKPCTPPAPNCYWPLRGYGFYTTSGIGYQPYRVVVLSFELLNAPATVCGPKLSTDLIKNQCVNFNFNGLTGTGVLTPSSKRFQPFQQFGRDVSDFTDSVRDPKTSEILDISPRSFGGVSVITPGTNASSEVAVLYQDVNCTDVSTLIHAEQLTPAWRIYSTGNNVFQTQAGCLIGAEHVDTSYECDIPIGAGICASYHTVSSLRSTSQKSIVAYTMSLGADSSIAYSNNTIAIPTNFSISITTEVMPVSMTKTSVDCNMYICGDSTECANLLLQYGSFCRQLNRALSGIAAEQDRNTREVFVQVKQMYKTPTLKDFGGFNFSQILPDPLKPTKRSFIEDLLFNKVTLADAGFMKQYGECLGDINARDLICAQKFNGLTVLPPLLTVDMIAAYTAALVSGTATAGWTFGAGAALQIPFAMQMAYRFNGIGVTQNVLYENQKQIANQFNKAISQIQESLTTTSTALGKLQDVVNQNAQALNTLVKQLSSNFGAISSVLNDILSRLDPPEAEVQIDRLITGRLQSLQTYVTQQLIRAAEIRASANLAATKMSECVLGQSKRVGFCGKGYHLMSFPQAAPHGVVFLHVTYVPSQERNFTTAPAICHEGKAYFPREGVFVFSGTSWFITQRNFFSPQIITTDNTFVSGNCDVVIGIINNTVYDPLQPELDSFKEELDKYFKNHTSPDVDLGDISGINASVVNIQEEIDRLNEVAKNLNESLIDLQELGKYEQYIKWPWYVWLGFIAGLIAIVMVTILLCCMTSCCSCLKGACSCGSCCKFDEDDSEPVLKGVKLHYT

SEQ ID NO: 12 - protein, 1255 aa, Artificial Sequence
  Artificial Sarbecovirus spike consensus 3
MFIFLFFLTLVSGSDLESCTTFDDVQAPNYPQHSSSRRGVYYPDEIFRSDTLYLTQDLFLPFDSNVTGFHTINHRFDNPVIPFKDGVYFAATEKSNVVRGWVFGSTMNNKSQSVIIINNSTNVVIRACNFELCDNPFFAVSKPTGTQTHTMIFNNAFNCTFEYISDSFSLDVAEKSGNFKHLREFVFKNKDGFLYVYKGYQPIDVVRDLPSGFNILKPIFKLPLGINITNFRAILTAFLPAQDTWGTSAAAYFVGYLKPATFMLKYDENGTITDAVDCSQNPLAELKCSVKSFEIDKGIYQTSNFRVAPSKEVVRFPNITNLCPFGEVFNATTFPSVYAWERKRISNCVADYSVLYNSTSFSTFKCYGVSATKLNDLCFSNVYADSFVVKGDDVRQIAPGQTGVIADYNYKLPDDFTGCVLAWNTRNIDATQTGNYNYKYRSLRHGKLRPFERDISNVPFSPDGKPCTPPAFNCYWPLNDYGFYTTNGIGYQPYRVVVLSFELLNAPATVCGPKLSTDLIKNQCVNFNFNGLTGTGVLTPSSKRFQPFQQFGRDVSDFTDSVRDPKTSEILDISPCSFGGVSVITPGTNTSSEVAVLYQDVNCTDVPVAIHADQLTPAWRIYSTGNNVFQTQAGCLIGAEHVDTSYECDIPIGAGICASYHTVSSLRSTSQKSIVAYTMSLGADSSIAYSNNTIAIPTNFSISITTEVMPVSMAKTSVDCNMYICGDSTECANLLLQYGSFCTQLNRALSGIAVEQDRNTREVFAQVKQMYKTPTLKDFGGFNFSQILPDPLKPTKRSFIEDLLFNKVTLADAGFMKQYGECLGDINARDLICAQKFNGLTVLPPLLTDDMIAAYTAALVSGTATAGWTFGAGAALQIPFAMQMAYRFNGIGVTQNVLYENQKQIANQFNKAISQIQESLTTTSTALGKLQDVVNQNAQALNTLVKQLSSNFGAISSVLNDILSRLDPPEAEVQIDRLITGRLQSLQTYVTQQLIRAAEIRASANLAATKMSECVLGQSKRVDFCGKGYHLMSFPQAAPHGVVFLHVTYVPSQERNFTTAPAICHEGKAYFPREGVFVFNGTSWFITQRNFFSPQIITTDNTFVSGNCDVVIGIINNTVYDPLQPELDSFKEELDKYFKNHTSPDVDLGDISGINASVVNIQKEIDRLNEVAKNLNESLIDLQELGKYEQYIKWPWYVWLGFIAGLIAIVMVTILLCCMTSCCSCLKGACSCGSCCKFDEDDSEPVLKGVKLHYT

SEQ ID NO: 13 - protein, 1255 aa, Artificial Sequence
  Artificial Sarbecovirus spike consensus 4
MFIFLFFLTLVSGSTIEKCTTFDDVQPPNYTQFLSSHRGVYYPDDIFRSDVLHLTQDHFLPFDSNVTGFITFGLNFDNPIIPFKDGIYFAATEKSNVIRGWVFGSTMNNKSQSVIIMNNSTNVVIRACNFELCDNPFFAVSKPNNTQIPSYIFNNAFNCTFEYVSDDFNLDVGEKPGNFKHLREFVFKNKDGFLYVYSGYQPIDVASGLPSGFNALKPIFKLPLGINITNFRTLLTAFPPRPDYWGTSAAAYFVGYLKPTTFMLKYDENGTITDAVDCSQNPLAELKCSVKSFEIDKGIYQTSNFRVAPSKEVVRFPNITNLCPFGEVFNATTFPSVYAWERKRISNCVADYSVLYNSTSFSTFKCYGVSATKLNDLCFSNVYADSFVVKGDDVRQIAPGQTGVIADYNYKLPDDFMGCVLAWNTRNIDATSTGNYNYKYRSLRHGKLRPFERDISNVPFSPDGKPCTPPAFNCYWPLNDYGFFTTNGIGYQPYRVVVLSFELLNAPATVCGPKLSTDLIKNQCVNFNFNGLTGTGVLTPSSKRFQPFQQFGRDVSDFTDSVRDPKTSEILDISPCSFGGVSVITPGTNTSSEVAVLYQDVNCTDVPVAIHADQLTPAWRVYSTGNNVFQTQAGCLIGAEHVDTSYECDIPIGAGICASYHTVSSLRSTSQKSIVAYTMSLGADSSIAYSNNTIAIPTNFSISITTEVMPVSMAKTSVDCNMYICGDSTECANLLLQYGSFCTQLNRALSGIAVEQDRNTREVFAQVKQMYKTPTLKDFGGFNFSQILPDPLKPTKRSFIEDLLFNKVTLADAGFMKQYGECLGDINARDLICAQKFNGLTVLPPLLTDDMIAAYTAALVSGTATAGWTFGAGAALQIPFAMQMAYRFNGIGVTQNVLYENQKQIANQFNKAISQIQESLTTTSTALGKLQDVVNQNAQALNTLVKQLSSNFGAISSVLNDILSRLDPPEAEVQIDRLITGRLQSLQTYVTQQLIRAAEIRASANLAATKMSECVLGQSKRVDFCGKGYHLMSFPQAAPHGVVFLHVTYVPSQERNFTTAPAICHEGKAYFPREGVFVFNGTSWFITQRNFFSPQIITTDNTFVSGSCDVVIGIINNTVYDPLQPELDSFKEELDKYFKNHTSPDVDLGDISGINASVVNIQKEIDRLNEVAKNLNESLIDLQELGKYEQYIKWPWYVWLGFIAGLIAIVMVTILLCCMTSCCSCLKGACSCGSCCKFDEDDSEPVLKGVKLHYT

SEQ ID NO: 14 - protein, 1271 aa, Artificial Sequence
  Artificial Sarbecovirus spike consensus 5
MFVFLFLLPLVSSQCVNLTTRTGIPPGYTNSSTRGVYYPDKVFRSSVLHLTQDLFLPFFSNVTWFNAINYQGGFKRFDNPVLPFNDGVYFASTEKSNIIRGWIFGTTLDARTQSLLIVNNATNVVIKVCEFQFCTDPFLGVYYHNNNKTWVENEFRVYSSANNCTFEYVSQPFLMDLEGKQGNFKNLREFVFKNVDGYFKIYSKHTPIDLVRDLPRGFSALEPLVDLPIGINITRFQTLLALHRSYLTPGKLESGWTTGAAAYYVGYLQPRTFLLSYNENGTITDAVDCALDPLSETKCTLKSLTVEKGIYQTSNFRVQPTISIVRFPNITNLCPFGEVFNATRFASVYAWNRKRISNCVADYSVLYNSTSFSTFKCYGVSPTKLNDLCFTNVYADSFVVRGDEVRQIAPGQTGVIADYNYKLPDDFTGCVIAWNSVKQDALTGGNYNYLYRLFRKSKLKPFERDISTEIYQAGSTPCNGVVGLNCYYPLQRYGFHPTTGVGYQPYRVVVLSFELLNAPATVCGPKKSTNLVKNKCVNFNFNGLTGTGVLTESNKKFLPFQQFGRDIADTTDAVRDPQTLEILDITPCSFGGVSVITPGTNTSNQVAVLYQDVNCTEVPVAIHADQLTPTWRVYSTGSNVFQTRAGCLIGAEHVNNSYECDIPIGAGICASYQTQTNSPRRARSVNSQSIIAYTMSLGAENSVAYSNNSIAIPTNFTISVTTEILPVSMTKTSVDCTMYICGDSIECSNLLLQYGSFCTQLNRALTGIAVEQDKNTQEVFAQVKQIYKTPPIKDFGGFNFSQILPDPSKPSKRSFIEDLLFNKVTLADAGFIKQYGDCLGDIAARDLICAQKFNGLTVLPPLLTDEMIAQYTSALLAGTITSGWTFGAGAALQIPFAMQMAYRFNGIGVTQNVLYENQKLIANQFNSAIGKIQDSLSSTASALGKLQDVVNQNAQALNTLVKQLSSNFGAISSVLNDILSRLDPPEAEVQIDRLITGRLQSLQTYVTQQLIRAAEIRASANLAATKMSECVLGQSKRVDFCGKGYHLMSFPQSAPHGVVFLHVTYVPAQEKNFTTAPAICHEGKAHFPREGVFVSNGTHWFVTQRNFYEPQIITTDNTFVSGSCDVVIGIVNNTVYDPLQPELDSFKEELDKYFKNHTSPDVDLGDISGINASVVNIQKEIDRLNEVAKNLNESLIDLQELGKYEQYIKWPWYIWLGFIAGLIAIIMVTIMLCCMTSCCSCLKGCCSCGSCCKFDEDDSEPVLKGVKLHYT

SEQ ID NO: 15 - protein, 1271 aa, Artificial Sequence
  Artificial Sarbecovirus spike consensus 6
MFVFLFLLPLVSSQCVNLTTRTGIPPGYTNSSTRGVYYPDKVFRSSVLHLTQDLFLPFFSNVTWFNAINYQGGFKRFDNPVLPFNDGVYFASTEKSNIIRGWIFGTTLDARTQSLLIVNNATNVVIKVCEFQFCTDPFLGVYYHNNNKTWVENEFRVYSSANNCTFEYVSQPFLMDLEGKQGNFKNLREFVFKNVDGYFKIYSKHTPIDLVRDLPRGFSALEPLVDLPIGINITRFQTLLALHRSYLTPGKLESGWTTGAAAYYVGYLQPRTFLLSYNENGTITDAVDCALDPLSETKCTLKSFTVEKGIYQTSNFRVQPTESIVRFPNITNLCPFGEVFNATRFASVYAWNRKRISNCVADYSVLYNSASFSTFKCYGVSPTKLNDLCFTNVYADSFVIRGDEVRQIAPGQTGKIADYNYKLPDDFTGCVIAWNSNNLDSKVGGNYNYLYRLFRKSNLKPFERDISTEIYQAGSTPCNGVEGFNCYFPLQSYGFQPTNGVGYQPYRVVVLSFELLHAPATVCGPKKSTNLVKNKCVNFNFNGLTGTGVLTESNKKFLPFQQFGRDIADTTDAVRDPQTLEILDITPCSFGGVSVITPGTNTSNQVAVLYQDVNCTEVPVAIHADQLTPTWRVYSTGSNVFQTRAGCLIGAEHVNNSYECDIPIGAGICASYQTQTNSPRRARSVNSQSIIAYTMSLGAENSVAYSNNSIAIPTNFTISVTTEILPVSMTKTSVDCTMYICGDSIECSNLLLQYGSFCTQLNRALTGIAVEQDKNTQEVFAQVKQIYKTPPIKDFGGFNFSQILPDPSKPSKRSFIEDLLFNKVTLADAGFIKQYGDCLGDIAARDLICAQKFNGLTVLPPLLTDEMIAQYTSALLAGTITSGWTFGAGAALQIPFAMQMAYRFNGIGVTQNVLYENQKLIANQFNSAIGKIQDSLSSTASALGKLQDVVNQNAQALNTLVKQLSSNFGAISSVLNDILSRLDPPEAEVQIDRLITGRLQSLQTYVTQQLIRAAEIRASANLAATKMSECVLGQSKRVDFCGKGYHLMSFPQSAPHGVVFLHVTYVPAQEKNFTTAPAICHEGKAHFPREGVFVSNGTHWFVTQRNFYEPQIITTDNTFVSGSCDVVIGIVNNTVYDPLQPELDSFKEELDKYFKNHTSPDVDLGDISGINASVVNIQKEIDRLNEVAKNLNESLIDLQELGKYEQYIKWPWYIWLGFIAGLIAIIMVTIMLCCMTSCCSCLKGCCSCGSCCKFDEDDSEPVLKGVKLHYT

SEQ ID NO: 16 - protein, 1267 aa, Artificial Sequence
  Artificial Sarbecovirus spike consensus 7
MFVFLFLLPLVSSQCVNLTTRTGIPPGYTNSSTRGVYYPDKVFRSSILHLTQDLFLPFFSNVTWFNTINYQGGFKKFDNPVLPFNDGVYFASTEKSNIIRGWIFGTTLDNTTQSLLIVNNATNVVIKVCEFQFCTDPFLGVYYHNNNKTWVENEFRVYSSANNCTFEYVSQPFLMDLEGKQGNFKNLREFVFKNVDGYFKIYSKHTPIDLVRDLPRGFSALEPLVDLPIGINITRFQTLLALHRSYLTPGKLESGWTTGAAAYYVGYLQQRTFLLSYNENGTITDAVDCSLDPLSETKCTLKSLTVEKGIYQTSNFRVQPTISIVRFPNITNLCPFGEVFNATKFASVYAWNRKRISNCVADYSVLYNSTSFSTFKCYGVSPTKLNDLCFTNVYADSFVVRGDEVRQIAPGQTGVIADYNYKLPDDFTGCVIAWNSVKQDAKTGGNYNYLYRLFRKSKLKPFERDISTEIYQAGSTPCNGVVGLNCYYPLERYGFHPTNGVGYQPYRVVVLSFELLNAPATVCGPKLSTTLVKNKCVNFNFNGLTGTGVLTTSKKKFLPFQQFGRDISDTTDAVRDPQTLEILDITPCSFGGVSVITPGTNTSNQVAVLYQDVNCTEVPMAIHADQLTPTWRVYSTGANVFQTRAGCLIGAEHVNNSYECDIPIGAGICASYHTQTNSRSVNSQSIIAYTMSLGAENSVAYSNNSIAIPTNFTISVTTEILPVSMTKTSVDCTMYICGDSIECSNLLLQYGSFCTQLNRALTGIAVEQDKNTQEVFAQVKQIYKTPPIKDFGGFNFSQILPDPSKPSKRSFIEDLLFNKVTLADAGFIKQYGDCLGDIAARDLICAQKFNGLTVLPPLLTDEMIAQYTSALLAGTITSGWTFGAGAALQIPFAMQMAYRFNGIGVTQNVLYENQKLIANQFNSAIGKIQDSLSSTASALGKLQDVVNQNAQALNTLVKQLSSNFGAISSVLNDILSRLDPPEAEVQIDRLITGRLQSLQTYVTQQLIRAAEIRASANLAATKMSECVLGQSKRVDFCGKGYHLMSFPQSAPHGVVFLHVTYVPAQEKNFTTAPAICHEGKAHFPREGVFVSNGTHWFVTQRNFYEPQIITTDNTFVSGSCDVVIGIVNNTVYDPLQPELDSFKEELDKYFKNHTSPDVDLGDISGINASVVNIQKEIDRLNEVAKNLNESLIDLQELGKYEQYIKWPWYIWLGFIAGLIAIIMVTIMLCCMTSCCSCLKGCCSCGSCCKFDEDDSEPVLKGVKLHYT

SEQ ID NO: 17 - protein, 1251 aa, Artificial Sequence
  Artificial Sarbecovirus spike consensus 8
MFIFLFFLTLVSSQCVNFDDRTPPPPTQTNSSTRGVYYPDDIFRSSVLHLTQDLFLPFFSNVTWFHTINYRFDNPVIPFKDGVYFAATEKSNVIRGWIFGSTMDNKSQSVIIVNNSTNVVIRVCNFQLCDNPFFAVYNKTWTQIESRVYSNAFNCTFEYVSKSFLLDLGEKQGNFKHLREFVFKNKDGFLKVYSGYTPIDLVRDLPSGFNALKPIFKLPLGINITNFRTLLTAFRPGQSGWGTSAAAYFVGYLKPRTFMLKYDENGTITDAVDCSQDPLAELKCTLKSFEVEKGIYQTSNFRVQPTKEVVRFPNITNLCPFGEVFNATTFPSVYAWERKRISNCVADYSVLYNSTSFSTFKCYGVSPTKLNDLCFSNVYADSFVVKGDDVRQIAPGQTGVIADYNYKLPDDFTGCVLAWNTRNIDATTGGNYNYLYRLFRHSKLKPFERDISNVIYSPGGKPCTPPGFNCYWPLNDYGFYPTNGVGYQPYRVVVLSFELLNAPATVCGPKLSTDLVKNKCVNFNFNGLTGTGVLTPSSKRFQPFQQFGRDVSDFTDSVRDPKTLEILDISPCSFGGVSVITPGTNTSSEVAVLYQDVNCTDVPVAIHADQLTPAWRVYSTGNNVFQTQAGCLIGAEHVNNSYECDIPIGAGICASYHTVSSLRSTSQKSIVAYTMSLGAENSIAYSNNSIAIPTNFSISVTTEVLPVSMTKTSVDCTMYICGDSTECSNLLLQYGSFCTQLNRALSGIAVEQDKNTQEVFAQVKQIYKTPPIKDFGGFNFSQILPDPSKPSKRSFIEDLLFNKVTLADAGFMKQYGDCLGDINARDLICAQKFNGLTVLPPLLTDEMIAAYTAALVSGTATAGWTFGAGAALQIPFAMQMAYRFNGIGVTQNVLYENQKQIANQFNKAISQIQESLTTTSTALGKLQDVVNQNAQALNTLVKQLSSNFGAISSVLNDILSRLDPPEAEVQIDRLITGRLQSLQTYVTQQLIRAAEIRASANLAATKMSECVLGQSKRVDFCGKGYHLMSFPQAAPHGVVFLHVTYVPSQERNFTTAPAICHEGKAHFPREGVFVSNGTHWFITQRNFYSPQIITTDNTFVSGSCDVVIGIVNNTVYDPLQPELDSFKEELDKYFKNHTSPDVDLGDISGINASVVNIQKEIDRLNEVAKNLNESLIDLQELGKYEQYIKWPWYVWLGFIAGLIAIVMVTIMLCCMTSCCSCLKGCCSCGSCCKFDEDDSEPVLKGVKLHYT

SEQ ID NO: 18 - protein, 269 aa, Artificial Sequence
  Artificial Sarbecovirus RBD consensus 1
SNFRVVPSGDVVRFPNITNLCPFGEVFNATKFPSVYAWERKRISNCVADYSVLYNSTSFSTFKCYGVSATKLNDLCFSNVYADSFVVKGDDVRQIAPGQTGVIADYNYKLPDDFMGCVLAWNTRNIDATSTGNHNYKYRYLRHGKLRPFERDISNVPFSPDGKPCTPPAPNCYWPLRGYGFYTTSGIGYQPYRVVVLSFELLNAPATVCGPKLSTDLIKNQCVNFNFNGLTGTGVLTPSSKRFQPFQQFGRDVSDFTDSVRDPKTSEIL

SEQ ID NO: 19 - protein, 267 aa, Artificial Sequence
  Artificial Sarbecovirus RBD consensus 2
SNFRVAPSKEVVRFPNITNLCPFGEVFNATTFPSVYAWERKRISNCVADYSVLYNSTSFSTFKCYGVSATKLNDLCFSNVYADSFVVKGDDVRQIAPGQTGVIADYNYKLPDDFTGCVLAWNTRNIDATQTGNYNYKYRSLRHGKLRPFERDISNVPFSPDGKPCTPPAFNCYWPLNDYGYTTNGIGYQPYRVVVLSFELLNAPATVCGPKLSTDLIKNQCVNFNFNGLTGTGVLTPSSRFQPFQQFGRDVSDFTDSVRDPKTSEIL

SEQ ID NO: 20 - protein, 270 aa, Artificial Sequence
  Artificial Sarbecovirus RBD consensus 3
SNFRVQPTISIVRFPNITNLCPFGEVFNATRFASVYAWNRKRISNCVADYSVLYNSTSFSTFKCYGVSPTKLNDLCFTNVYADSFVVRGDEVRQIAPGQTGVIADYNYKLPDDFTGCVIAWNSVKQDALTGGNYNYLYRLFRKSKLKPFERDISTEIYQAGSTPCNGVVGLNCYYPLQRYGFHPTTGVGYQPYRVVVLSFELLNAPATVCGPKKSTNLVKNKCVNFNFNGLTGTGVLTESNKKFLPFQQFGRDIADTTDAVRDPQTLEIL

SEQ ID NO: 21 - protein, 270 aa, Artificial Sequence
  Artificial Sarbecovirus RBD consensus 4
SNFRVQPTISIVRFPNITNLCPFGEVFNATKFASVYAWNRKRISNCVADYSVLYNSTSFSTFKCYGVSPTKLNDLCFTNVYADSFVVRGDEVRQIAPGQTGVIADYNYKLPDDFTGCVIAWNSVKQDAKTGGNYNYLYRLFRKSKLKPFERDISTEIYQAGSTPCNGVVGLNCYYPLERYGFHPTNGVGYQPYRVVVLSFELLNAPATVCGPKLSTTLVKNKCVNFNFNGLTGTGVLTTSKKKFLPFQQFGRDISDTTDAVRDPQTLEIL

SEQ ID NO: 22 - protein, 269 aa, Artificial Sequence
  Artificial Sarbecovirus RBD consensus 5
SNFRVQPTKEVVRFPNITNLCPFGEVFNATTFPSVYAWERKRISNCVADYSVLYNSTSFSTFKCYGVSPTKLNDLCFSNVYADSFVVKGDDVRQIAPGQTGVIADYNYKLPDDFTGCVLAWNTRNIDATTGGNYNYLYRLFRHSKLKPFERDISNVIYSPGGKPCTPPGFNCYWPLNDYGFYPTNGVGYQPYRVVVLSFELLNAPATVCGPKLSTDLVKNKCVNFNFNGLTGTGVLTPSSKRFQPFQQFGRDVSDFTDSVRDPKTLEIL

SEQ ID NO: 23 - protein, 1256 aa, Unknown
  Coronavirus BtRs-BetaCoV/YN2018B Spike protein
MKLLVLVFATLVSSYTIEKCTDFDDRTPPSNTQFLSSHRGVYYPDDIFRSNVLHLVQDHFLPFDSNVTRFITFGLNFDNPIIPFRDGVYFAATEKSNVIRGWVFGSTMNNKSQSVIIMNNSTNLVIRACNFELCDNPFFVVLRSNNTQIPSYIFNNAFNCTFEYVSKDFNLDIGEKPGNFKDLREFVFRNKDGFLHVYSGYQPISAASGLPTGFNALKPIFKLPLGINITNFRTLLTAFPPNPGYWGTSAAAYFVGYLKPTTFMLKYDENGTITDAVDCSQNPLAELKCSVKSFEIDKGIYQTSNFRVAPSKEVVRFPNITNLCPFGEVFNATTFPSVYAWERKRISNCVADYSVLYNSTSFSTFKCYGVSATKLNDLCFSNVYADSFVVKGDDVRQIAPGQTGVIADYNYKLPDDFMGCVLAWNTRNIDATSTGNYNYKYRSLRHGKLRPFERDISNVPFSPDGKPCTPPAFNCYWPLNDYGFFTTNGIGYQPYRVVVLSFELLNAPATVCGPKLSTDLIKNQCVNFNFNGLTGTGVLTPSSKRFQPFQQFGRDVSDFTDSVRDPKTSEILDISPCSFGGVSVITPGTNTSSEVAVLYQDVNCTDVPVAIHADQLTPAWRIYSTGNNVFQTQAGCLIGAEHVDTSYECDIPIGAGICASYHTVSSLRSTSQKSIVAYTMSLGADSSIAYSNNTIAIPTNFSISITTEVMPVSMAKTSVDCNMYICGDSTECANLLLQYGSFCTQLNRALSGIAVEQDRNTREVFAQVKQMYKTPTLKDFGGFNFSQILPDPLKPTKRSFIEDLLFNKVTLADAGFMKQYGECLGDINARDLICAQKFNGLTVLPPLLTDDMIAAYTAALVSGTATAGWTFGAGAALQIPFAMQMAYRFNGIGVTQNVLYENQKQIANQFNKAISQIQESLTTTSTALGKLQDVVNQNAQALNTLVKQLSSNFGAISSVLNDILSRLDKVEAEVQIDRLITGRLQSLQTYVTQQLIRAAEIRASANLAATKMSECVLGQSKRVDFCGKGYHLMSFPQAAPHGVVFLHVTYVPSQERNFTTAPAICHEGKAYFPREGVFVFNGTSWFITQRNFFSPQIITTDNTFVSGSCDVVIGIINNTVYDPLQPELDSFKEELDKYFKNHTSPDVDLGDISGINASVVNIQKEIDRLNEVAKNLNESLIDLQELGKYEQYIKWPWYVWLGFIAGLIAIVMVTILLCCMTSCCSCLKGACSCGSCCKFDEDDSEPVLKGVKLHYT

SEQ ID NO: 24 - protein, 1256 aa, Unknown
  Bat SARS-like coronavirus Spike protein
MKLLVLVFATLVSSYTIEKCLDFDDRTPPANTQFLSSHRGVYYPDDIFRSNVLHLVQDHFLPFDSNVTRFITFGLNFDNPIIPFRDGIYFAATEKSNVIRGWVFGSTMNNKSQSVIIMNNSTNLVIRACNFELCDNPFFVVLKSNNTQIPSYIFNNAFNCTFEYVSKDFNLDLGEKPGNFKDLREFVFRNKDGFLHVYSGYQPISAASGLPTGFNALKPIFKLPLGINITNFRTLLTAFPPRPDYWGTSAAAYFVGYLKPTTFMLKYDENGTITDAVDCSQNPLAELKCSVKSFEIDKGIYQTSNFRVAPSKEVVRFPNITNLCPFGEVFNATTFPSVYAWERKRISNCVADYSVLYNSTSFSTFKCYGVSATKLNDLCFSNVYADSFVVKGDDVRQIAPGQTGVIADYNYKLPDDFMGCVLAWNTRNIDATSTGNYNYKYRSLRHGKLRPFERDISNVPFSPDGKPCTPPAFNCYWPLNDYGFFTTNGIGYQPYRVVVLSFELLNAPATVCGPKLSTDLIKNQCVNFNFNGLTGTGVLTSSSKRFQPFQQFGRDVSDFTDSVRDPKTSEILDISPCSFGGVSVITPGTNTSSEVAVLYQDVNCTDVPVAIHADQLTPAWRIYSTGNNVFQTQAGCLIGAEHVDTSYECDIPIGAGICASYHTVSSLRSTSQKSIVAYTMSLGADSSIVYSNNTIAIPTNFSISITTEVMPVSMAKTSVDCNMYICGDSTECANLLLQYGSFCTQLNRALSGIAVEQDRNTREVFAQVKQMYKTPTLKDFGGFNFSQILPDPLKPTKRSFIEDLLFNKVTLADAGFMKQYGECLGDINARDLICAQKFNGLTVLPPLLTDDMIAAYTAALVSGTATAGWTFGAGAALQIPFAMQMAYRFNGIGVTQNVLYENQKQIANQFNKAISQIQESLTTTSTALGKLQDVVNQNAQALNTLVKQLSSNFGAISSVLNDILSRLDKVEAEVQIDRLITGRLQSLQTYVTQQLIRAAEIRASANLAATKMSECVLGQSKRVDFCGKGYHLMSFPQAAPHGVVFLHVTYVPSQERNFTTAPAICHEGKAYFPREGVFVFNGTSWFITQRNFFSPQIITTDNTFVSGNCDVVIGIINNTVYDPLQPELDSFKEELDKYFKNHTSPDVDLGDISGINASVVNIQKEIDRLNEVAKNLNESLIDLQELGKYEQYIKWPWYVWLGFIAGLIAIVMVTILLCCMTSCCSCLKGACSCGSCCKFDEDDSEPVLKGVKLHYT

SEQ ID NO: 25 - protein, 1256 aa, Unknown
  Bat SARS-like coronavirus Spike protein
MKLLVLVFATLVSSYTIEKCLDFDDRTPPANTQFLSSHRGVYYPDDIFRSNVLHLVQDHFLPFDSNVTRFITFGLNFDNPIIPFRDGIYFAATEKSNVIRGWVFGSTMNNKSQSVIIMNNSTNLVIRACNFELCDNPFFVVLKSNNTQIPSYIFNNAFNCTFEYVSKDFNLDLGEKPGNFKDLREFVFRNKDGFLHVYSGYQPISAASGLPTGFNALKPIFKLPLGINITNFRTLLTAFPPRPDYWGTSAAAYFVGYLKPTTFMLKYDENGTITDAVDCSQNPLAELKCSVKSFEIDKGIYQTSNFRVAPSKEVVRFPNITNLCPFGEVFNATTFPSVYAWERKRISNCVADYSVLYNSTSFSTFKCYGVSATKLNDLCFSNVYADSFVVKGDDVRQIAPGQTGVIADYNYKLPDDFMGCVLAWNTRNIDATSTGNYNYKYRSLRHGKLRPFERDISNVPFSPDGKPCTPPAFNCYWPLNDYGFFTTNGIGYQPYRVVVLSFELLNAPATVCGPKLSTDLIKNQCVNFNFNGLTGTGVLTSSSKRFQPFQQFGRDVSDFTDSVRDPKTSEILDISPCSFGGVSVITPGTNTSSEVAVLYQDVNCTDVPVAIHADQLTPAWRIYSTGNNVFQTQAGCLIGAEHVDTSYECDIPIGAGICASYHTVSSLRSTSQKSIVAYTMSLGADSSIVYSNNTIAIPTNFSISITTEVMPVSMAKTSVDCNMYICGDSTECANLLLQYGSFCTQLNRALSGIAVEQDRNTREVFAQVKQMYKTPTLKDFGGFNFSQILPDPLKPTKRSFIEDLLFNKVTLADAGFMKQYGECLGDINARDLICAQKFNGLTVLPPLLTDDMIAAYTAALVSGTATAGWTFGAGAALQIPFAMQMAYRFNGIGVTQNVLYENQKQIANQFNKAISQIQESLTTTSTALGKLQDVVNQNAQALNTLVKQLSSNFGAISSVLNDILSRLDKVEAEVQIDRLITGRLQSLQTYVTQQLIRAAEIRASANLAATKMSECVLGQSKRVDFCGKGYHLMSFPQAAPHGVVFLHVTYVPSQERNFTTAPAICHEGKAYFPREGVFVFNGTSWFITQRNFFSPQIITTDNTFVSGNCDVVIGIINNTVYDPLQPELDSFKEELDKYFKNHTSPDVDLGDISGINASVVNIQKEIDRLNEVAKNLNESLIDLQELGKYEQYIKWPWYVWLGFIAGLIAIVMVTILLCCMTSCCSCLKGACSCGSCCKFDEDDPEPVLKGVKLHYT

SEQ ID NO: 26 - protein, 1256 aa, Unknown
  Bat SARS-like coronavirus RsSHC014 Spike protein
MKLLVLVFATLVSSYTIEKCLDFDDRTPPANTQFLSSHRGVYYPDDIFRSNVLHLVQDHFLPFDSNVTRFITFGLNFDNPIIPFRDGIYFAATEKSNVIRGWVFGSTMNNKSQSVIIMNNSTNLVIRACNFELCDNPFFVVLKSNNTQIPSYIFNNAFNCTFEYVSKDFNLDLGEKPGNFKDLREFVFRNKDGFLHVYSGYQPISAASGLPTGFNALKPIFKLPLGINITNFRTLLTAFPPRPDYWGTSAAAYFVGYLKPTTFMLKYDENGTITDAVDCSQNPLAELKCSVKSFEIDKGIYQTSNFRVAPSKEVVRFPNITNLCPFGEVFNATTFPSVYAWERKRISNCVADYSVLYNSTSFSTFKCYGVSATKLNDLCFSNVYADSFVVKGDDVRQIAPGQTGVIADYNYKLPDDFLGCVLAWNTNSKDSSTSGNYNYLYRWVRRSKLNPYERDLSNDIYSPGGQSCSAVGPNCYNPLRPYGFFTTAGVGHQPYRVVVLSFELLNAPATVCGPKLSTDLIKNQCVNFNFNGLTGTGVLTPSSKRFQPFQQFGRDVSDFTDSVRDPKTSEILDISPCSFGGVSVITPGTNTSSEVAVLYQDVNCTDVPVAIHADQLTPSWRVYSTGNNVFQTQAGCLIGAEHVDTSYECDIPIGAGICASYHTVSSLRSTSQKSIVAYTMSLGADSSIAYSNNTIAIPTNFSISITTEVMPVSMAKTSVDCNMYICGDSTECANLLLQYGSFCTQLNRALSGIAVEQDRNTREVFAQVKQMYKTPTLKDFGGFNFSQILPDPLKPTKRSFIEDLLFNKVTLADAGFMKQYGECLGDINARDLICAQKFNGLTVLPPLLTDDMIAAYTAALVSGTATAGWTFGAGAALQIPFAMQMAYRFNGIGVTQNVLYENQKQIANQFNKAISQIQESLTTTSTALGKLQDVVNQNAQALNTLVKQLSSNFGAISSVLNDILSRLDKVEAEVQIDRLITGRLQSLQTYVTQQLIRAAEIRASANLAATKMSECVLGQSKRVDFCGKGYHLMSFPQAAPHGVVFLHVTYVPSQERNFTTAPAICHEGKAYFPREGVFVFNGTSWFITQRNFFSPQIITTDNTFVSGSCDVVIGIINNTVYDPLQPELDSFKEELDKYFKNHTSPDVDLGDISGINASVVNIQKEIDRLNEVAKNLNESLIDLQELGKYEQYIKWPWYVWLGFIAGLIAIVMVTILLCCMTSCCSCLKGACSCGSCCKFDEDDSEPVLKGVKLHYT

SEQ ID NO: 27 - protein, 1256 aa, Unknown
  Bat SARS-like coronavirus Spike protein
MKLLVLVFATLVSSYTIEKCLDFDDRTPPANTQFLSSHRGVYYPDDIFRSNVLHLVQDHFLPFDSNVTRFITFGLNFDNPIIPFRDGIYFAATEKSNVIRGWVFGSTMNNKSQSVIIMNNSTNLVIRACNFELCDNPFFVVLKSNNTQIPSYIFNNAFNCTFEYVSKDFNLDLGEKPGNFKDLREFVFRNKDGFLHVYSGYQPISAASGLPTGFNALKPIFKLPLGINITNFRTLLTAFPPRPDYWGTSAAAYFVGYLKPTTFMLKYDENGTITDAVDCSQNPLAELKCSVKSFEIDKGIYQTSNFRVAPSKEVVRFPNITNLCPFGEVFNATTFPSVYAWERKRISNCVADYSILYNSTSFSTFKCYGVSATKLNDLCFSNVYADSFVVKGDDVRQIAPGQTGVIADYNYKLPDDFLGCVLAWNTNSKDSSTSGNYNYLYRWVRRSKLNPYERDLSNDIYSPGGQSCSAVGPNCYNPLRPYGFFTTAGVGHQPYRVVVLSFELLNAPATVCGPKLSTDLIKNQCVNFNFNGLTGTGVLTPSSKRFQPFQQFGRDVSDFTDSVRDPKTSEILDISPCSFGGVSVITPGTNTSSEVAVLYQDVNCTDVPVAIHADQLTPSWRVYSTGNNVFQTQAGCLIGAEHVDTSYECDIPIGAGICASYHTVSSLRSTSQKSIVAYTMSLGADSSIAYSNNTIAIPTNFSISITTEVMPVSMAKTSVDCNMYICGDSTECANLLLQYGSFCTQLNRALSGIAVEQDRNTREVFAQVKQMYKTPTLKDFGGFNFSQILPDPLKPTKRSFIEDLLFNKVTLADAGFMKQYGECLGDINARDLICAQKFNGLTVLPPLLTDDMIAAYTAALVSGTATAGWTFGAGAALQIPFAMQMAYRFNGIGVTQNVLYENQKQIANQFNKAISQIQESLTTTSTALGKLQDVVNQNAQALNTLVKQLSSNFGAISSVLNDILSRLDKVEAEVQIDRLITGRLQSLQTYVTQQLIRAAEIRASANLAATKMSECVLGQSKRVDFCGKGYHLMSFPQAAPHGVVFLHVTYVPSQERNFTTAPAICHEGKAYFPREGVFVFNGTSWFITQRNFFSPQIITTDNTFVSGSCDVVIGIINNTVYDPLQPELDSFKEELDKYFKNHTSPDVDLGDISGINASVVNIQKEIDRLNEVAKNLNESLIDLQELGKYEQYIKWPWYVWLGFIAGLIAIVMVTILLCCMTSCCSCLKGACSCGSCCKFDEDDSEPVLKGVKLHYT

SEQ ID NO: 28 - protein, 1256 aa, Unknown
  Bat SARS-like coronavirus Rs3367 Spike protein
MKLLVLVFATLVSSYTIEKCLDFDDRTPPANTQFLSSHRGVYYPDDIFRSNVLHLVQDHFLPFDSNVTRFITFGLNFDNPIIPFKDGIYFAATEKSNVIRGWVFGSTMNNKSQSVIIMNNSTNLVIRACNFELCDNPFFVVLKSNNTQIPSYIFNNAFNCTFEYVSKDFNLDLGEKPGNFKDLREFVFRNKDGFLHVYSGYQPISAASGLPTGFNALKPIFKLPLGINITNFRTLLTAFPPRPDYWGTSAAAYFVGYLKPTTFMLKYDENGTITDAVDCSQNPLAELKCSVKSFEIDKGIYQTSNFRVAPSKEVVRFPNITNLCPFGEVFNATTFPSVYAWERKRISNCVADYSVLYNSTSFSTFKCYGVSATKLNDLCFSNVYADSFVVKGDDVRQIAPGQTGVIADYNYKLPDDFTGCVLAWNTRNIDATQTGNYNYKYRSLRHGKLRPFERDISNVPFSPDGKPCTPPAFNCYWPLNDYGFYITNGIGYQPYRVVVLSFELLNAPATVCGPKLSTDLIKNQCVNFNFNGLTGTGVLTPSSKRFQPFQQFGRDVSDFTDSVRDPKTSEILDISPCSFGGVSVITPGTNTSSEVAVLYQDVNCTDVPVAIHADQLTPSWRVYSTGNNVFQTQAGCLIGAEHVDTSYECDIPIGAGICASYHTVSSLRSTSQKSIVAYTMSLGADSSIAYSNNTIAIPTNFSISITTEVMPVSMAKTSVDCNMYICGDSTECANLLLQYGSFCTQLNRALSGIAVEQDRNTREVFAQVKQMYKTPTLKDFGGFNFSQILPDPLKPTKRSFIEDLLFNKVTLADAGFMKQYGECLGDINARDLICAQKFNGLTVLPPLLTDDMIAAYTAALVSGTATAGWTFGAGAALQIPFAMQMAYRFNGIGVTQNVLYENQKQIANQFNKAISQIQESLTTTSTALGKLQDVVNQNAQALNTLVKQLSSNFGAISSVLNDILSRLDKVEAEVQIDRLITGRLQSLQTYVTQQLIRAAEIRASANLAATKMSECVLGQSKRVDFCGKGYHLMSFPQAAPHGVVFLHVTYVPSQERNFTTAPAICHEGKAYFPREGVFVFNGTSWFITQRNFFSPQIITTDNTFVSGSCDVVIGIINNTVYDPLQPELDSFKEELDKYFKNHTSPDVDLGDISGINASVVNIQKEINRLNEVAKNLNESLIDLQELGKYEQYIKWPWYVWLGFIAGLIAIVMVTILLCCMTSCCSCLKGACSCGSCCKFDEDDSEPVLKGVKLHYT

SEQ ID NO: 29 - protein, 1256 aa, Unknown
  Bat SARS-like coronavirus WIV1Spike protein
MKLLVLVFATLVSSYTIEKCLDFDDRTPPANTQFLSSHRGVYYPDDIFRSNVLHLVQDHFLPFDSNVTRFITFGLNFDNPIIPFKDGIYFAATEKSNVIRGWVFGSTMNNKSQSVIIMNNSTNLVIRACNFELCDNPFFVVLKSNNTQIPSYIFNNAFNCTFEYVSKDFNLDLGEKPGNFKDLREFVFRNKDGFLHVYSGYQPISAASGLPTGFNALKPIFKLPLGINITNFRTLLTAFPPRPDYWGTSAAAYFVGYLKPTTFMLKYDENGTITDAVDCSQNPLAELKCSVKSFEIDKGIYQTSNFRVAPSKEVVRFPNITNLCPFGEVFNATTFPSVYAWERKRISNCVADYSVLYNSTSFSTFKCYGVSATKLNDLCFSNVYADSFVVKGDDVRQIAPGQTGVIADYNYKLPDDFTGCVLAWNTRNIDATQTGNYNYKYRSLRHGKLRPFERDISNVPFSPDGKPCTPPAFNCYWPLNDYGFYITNGIGYQPYRVVVLSFELLNAPATVCGPKLSTDLIKNQCVNFNFNGLTGTGVLTPSSKRFQPFQQFGRDVSDFTDSVRDPKTSEILDISPCSFGGVSVITPGTNTSSEVAVLYQDVNCTDVPVAIHADQLTPSWRVHSTGNNVFQTQAGCLIGAEHVDTSYECDIPIGAGICASYHTVSSLRSTSQKSIVAYTMSLGADSSIAYSNNTIAIPTNFSISITTEVMPVSMAKTSVDCNMYICGDSTECANLLLQYGSFCTQLNRALSGIAVEQDRNTREVFAQVKQMYKTPTLKDFGGFNFSQILPDPLKPTKRSFIEDLLFNKVTLADAGFMKQYGECLGDINARDLICAQKFNGLTVLPPLLTDDMIAAYTAALVSGTATAGWTFGAGAALQIPFAMQMAYRFNGIGVTQNVLYENQKQIANQFNKAISQIQESLTTTSTALGKLQDVVNQNAQALNTLVKQLSSNFGAISSVLNDILSRLDKVEAEVQIDRLITGRLQSLQTYVTQQLIRAAEIRASANLAATKMSECVLGQSKRVDFCGKGYHLMSFPQAAPHGVVFLHVTYVPSQERNFTTAPAICHEGKAYFPREGVFVFNGTSWFITQRNFFSPQIITTDNTFVSGSCDVVIGIINNTVYDPLQPELDSFKEELDKYFKNHTSPDVDLGDISGINASVVNIQKEIDRLNEVAKNLNESLIDLQELGKYEQYIKWPWYVWLGFIAGLIAIVMVTILLCCMTSCCSCLKGACSCGSCCKFDEDDSEPVLKGVKLHYT

SEQ ID NO: 30 - protein, 1255 aa, Unknown
  SARS coronavirus Tor2 Spike glycoprotein
MFIFLLFLTLTSGSDLDRCTTFDDVQAPNYTQHTSSMRGVYYPDEIFRSDTLYLTQDLFLPFYSNVTGFHTINHTFGNPVIPFKDGIYFAATEKSNVVRGWVFGSTMNNKSQSVIIINNSTNVVIRACNFELCDNPFFAVSKPMGTQTHTMIFDNAFNCTFEYISDAFSLDVSEKSGNFKHLREFVFKNKDGFLYVYKGYQPIDVVRDLPSGFNTLKPIFKLPLGINITNFRAILTAFSPAQDIWGTSAAAYFVGYLKPTTFMLKYDENGTITDAVDCSQNPLAELKCSVKSFEIDKGIYQTSNFRVVPSGDVVRFPNITNLCPFGEVFNATKFPSVYAWERKKISNCVADYSVLYNSTFFSTFKCYGVSATKLNDLCFSNVYADSFVVKGDDVRQIAPGQTGVIADYNYKLPDDFMGCVLAWNTRNIDATSTGNYNYKYRYLRHGKLRPFERDISNVPFSPDGKPCTPPALNCYWPLNDYGFYTTTGIGYQPYRVVVLSFELLNAPATVCGPKLSTDLIKNQCVNFNFNGLTGTGVLTPSSKRFQPFQQFGRDVSDFTDSVRDPKTSEILDISPCAFGGVSVITPGTNASSEVAVLYQDVNCTDVSTAIHADQLTPAWRIYSTGNNVFQTQAGCLIGAEHVDTSYECDIPIGAGICASYHTVSLLRSTSQKSIVAYTMSLGADSSIAYSNNTIAIPTNFSISITTEVMPVSMAKTSVDCNMYICGDSTECANLLLQYGSFCTQLNRALSGIAAEQDRNTREVFAQVKQMYKTPTLKYFGGFNFSQILPDPLKPTKRSFIEDLLFNKVTLADAGFMKQYGECLGDINARDLICAQKFNGLTVLPPLLTDDMIAAYTAALVSGTATAGWTFGAGAALQIPFAMQMAYRFNGIGVTQNVLYENQKQIANQFNKAISQIQESLTTTSTALGKLQDVVNQNAQALNTLVKQLSSNFGAISSVLNDILSRLDKVEAEVQIDRLITGRLQSLQTYVTQQLIRAAEIRASANLAATKMSECVLGQSKRVDFCGKGYHLMSFPQAAPHGVVFLHVTYVPSQERNFTTAPAICHEGKAYFPREGVFVFNGTSWFITQRNFFSPQIITTDNTFVSGNCDVVIGIINNTVYDPLQPELDSFKEELDKYFKNHTSPDVDLGDISGINASVVNIQKEIDRLNEVAKNLNESLIDLQELGKYEQYIKWPWYVWLGFIAGLIAIVMVTILLCCMTSCCSCLKGACSCGSCCKFDEDDSEPVLKGVKLHYT

SEQ ID NO: 31 - protein, 1255 aa, Unknown
  Bat SARS-like coronavirus Spike protein
MFIFLFFLTLTSGSDLESCTTFDDVQAPNYPQHSSSRRGVYYPDEIFRSDTLYLTQDLFLPFYSNVTGFHTINHRFDNPVIPFKDGVYFAATEKSNVVRGWVFGSTMNNKSQSVIIINNSTNVVIRACNFELCDNPFFAVSKPTGTQTHTMIFDNAFNCTFEYISDSFSLDVAEKSGNFKHLREFVFKNKDGFLYVYKGYQPIDVVRDLPSGFNILKPIFKLPLGINITNFRAILTAFLPAQDTWGTSAAAYFVGYLKPATFMLKYDENGTITDAVDCSQNPLAELKCSVKSFEIDKGIYQTSNFRVAPSKEVVRFPNITNLCPFGEVFNATTFPSVYAWERKRISNCVADYSVLYNSTSFSTFKCYGVSATKLNDLCFSNVYADSFVVKGDDVRQIAPGQTGVIADYNYKLPDDFLGCVLAWNTNSKDSSTSGNYNYLYRWVRRSKLNPYERDLSNDIYSPGGQSCSAIGPNCYNPLRPYGFFTTAGVGHQPYRVVVLSFELLNAPATVCGPKLSTDLIKNQCVNFNFNGLTGTGVLTSSSKRFQPFQQFGRDVSDFTDSVRDPKTSEILDISPCSFGGVSVITPGTNTSSEVAVLYQDVNCTDVPVAIHADQLTPAWRIYSTGNNVFQTQAGCLIGAEHVDTSYECDIPIGAGICASYHTVSSLRSTSQKSIVAYTMSLGADSSIAYSNNTIAIPTNFSISITTEVMPVSMAKTSVDCNMYICGDSTECANLLLQYGSFCTQLNRALSGIAVEQDRNTREVFAQVKQMYKTPALKDFGGFNFSQILPDPLKPTKRSFIEDLLFNKVTLADAGFMKQYGECLGDVNARDLICAQKFNGLTVLPPLLTDDMIAAYTAALVSGTATAGWTFGAGAALQIPFAMQMAYRFNGIGVTQNVLYENQKQIANQFNKAISQIQESLTTTSTALGKLQDVVNQNAQALNTLVKQLSSNFGAISSVLNDILSRLDKVEAEVQIDRLITGRLQSLQTYVTQQLIRAAEIRASANLAATKMSECVLGQSKRVDFCGKGYHLMSFPQAAPHGVVFLHVTCVPSQERNFTTAPAICHEGKAYFPREGVFVFNGTSWFITQRNFFSPQIITTDNTFVSGSCDVVIGIINNTVYDPLQPELDSFKEELDKYFKNHTSPDVDLGDISGINASVVNIQKEIDRLNEVAKNLNESLIDLQELGKYEQYIKWPWYVWLGFIAGLIAIVMVTILLCCMTSCCSCLKGACSCGSCCKFDEDDSEPVLKGVKLHYT

SEQ ID NO: 32 - protein, 1255 aa, Unknown
  SARS-like coronavirus WIV16 Spike protein
MFIFLFFLTLTSGSDLESCTTFDDVQAPNYPQHSSSRRGVYYPDEIFRSDTLYLTQDLFLPFYSNVTGFHTINHRFDNPVIPFKDGVYFAATEKSNVVRGWVFGSTMNNKSQSVIIINNSTNVVIRACNFELCDNPFFAVSKPTGTQTHTMIFDNAFNCTFEYISDSFSLDVAEKSGNFKHLREFVFKNKDGFLYVYKGYQPIDVVRDLPSGFNILKPIFKLPLGINITNFRAILTAFLPAQDTWGTSAAAYFVGYLKPATFMLKYDENGTITDAVDCSQNPLAELKCSVKSFEIDKGIYQTSNFRVAPSKEVVRFPNITNLCPFGEVFNATTFPSVYAWERKRISNCVADYSVLYNSTSFSTFKCYGVSATKLNDLCFSNVYADSFVVKGDDVRQIAPGQTGVIADYNYKLPDDFTGCVLAWNTRNIDATQTGNYNYKYRSLRHGKLRPFERDISNVPFSPDGKPCTPPAFNCYWPLNDYGFYITNGIGYQPYRVVVLSFELLNAPATVCGPKLSTDLIKNQCVNFNFNGLTGTGVLTPSSKRFQPFQQFGRDVLDFTDSVRDPKTSEILDISPCSFGGVSVITPGTNTSSEVAVLYQDVNCTDVPVAIHADQLTPSWRVYSTGNNVFQTQAGCLIGAEHVDTSYECDIPIGAGICASYHTVSSLRSTSQKSIVAYTMSLGADSSIAYSNNTIAIPTNFSISITTEVMPVSMAKTSVDCNMYICGDSTECANLLLQYGSFCTQLNRALSGIAVEQDRNTREVFAQVKQMYKTPTLKDFGGFNFSQILPDPLKPTKRSFIEDLLFNKVTLADAGFMKQYGECLGDINARDLICAQKFNGLTVLPPLLTDDMIAAYTAALVSGTATAGWTFGAGAALQIPFAMQMAYRFNGIGVTQNVLYENQKQIANQFNKAISQIQESLTTTSTALGKLQDVVNQNAQALNTLVKQLSSNFGAISSVLNDILSRLDKVEAEVQIDRLITGRLQSLQTYVTQQLIRAAEIRASANLAATKMSECVLGQSKRVDFCGKGYHLMSFPQAAPHGVVFLHVTYVPSQERNFTTAPAICHEGKAYFPREGVFVFNGTSWFITQRNFFSPQIITTDNTFVSGSCDVVIGIINNTVYDPLQPELDSFKEELDKYFKNHTSPDVDLGDISGINASVVNIQKEIDRLNEVAKNLNESLIDLQELGKYEQYIKWPWYVWLGFIAGLIAIVMVTILLCCMTSCCSCLKGACSCGSCCKFDEDDSEPVLKGVKLHYT

SEQ ID NO: 33 - protein, 1255 aa, Unknown
  Bat SARS-like coronavirus Spike protein
MFIFLFFLTLTSGSDLESCTTFDDVQAPNYPQHSSSRRGVYYPDEIFRSDTLYLTQDLFLPFYSNVTGFHTINHRFDNPVIPFKDGVYFAATEKSNVVRGWVFGSTMNNKSQSVIIINNSTNVVIRACNFELCDNPFFAVSKPTGTQTHTMIFDNAFNCTFEYISDSFSLDVAEKSGNFKHLREFVFKNKDGFLYVYKGYQPIDVVRDLPSGFNILKPIFKLPLGINITNFRAILTAFLPAQDTWGTSAAAYFVGYLKPATFMLKYDENGTITDAVDCSQNPLAELKCSVKSFEIDKGIYQTSNFRVAPSKEVVRFPNITNLCPFGEVFNATTFPSVYAWERKRISNCVADYSVLYNSTSFSTFKCYGVSATKLNDLCFSNVYADSFVVKGDDVRQIAPGQTGVIADYNYKLPDDFTGCVLAWNTRNIDATQTGNYNYKYRSLRHGKLRPFERDISNVPFSPDGKPCTPPAFNCYWPLNDYGFYITNGIGYQPYRVVVLSFELLNAPATVCGPKLSTDLIKNQCVNFNFNGLTGTGVLTPSSKRFQPFQQFGRDVSDFTDSVRDPKTSEILDISPCSFGGVSVITPGTNTSSEVAVLYQDVNCTDVPVAIHADQLTPSWRVYSTGNNVFQTQAGCLIGAEHVDTSYECDIPIGAGICASYHTVSSLRSTSQKSIVAYTMSLGADSSIAYSNNTIAIPTNFSISITTEVMPVSMAKTSVDCNMYICGDSTECANLLLQYGSFCTQLNRALSGIAVEQDRNTREVFAQVKQMYKTPTLKDFGGFNFSQILPDPLKPTKRSFIEDLLFNKVTLADAGFMKQYGECLGDINARDLICAQKFNGLTVLPPLLTDDMIAAYTAALVSGTATAGWTFGAGAALQIPFAMQMAYRFNGIGVTQNVLYENQKQIANQFNKAISQIQESLTTTSTALGKLQDVVNQNAQALNTLVKQLSSNFGAISSVLNDILSRLDKVEAEVQIDRLITGRLQSLQTYVTQQLIRAAEIRASANLAATKMSECVLGQSKRVDFCGKGYHLMSFPQAAPHGVVFLHVTYVPSQERNFTTAPAICHEGKAYFPREGVFVFNGTSWFITQRNFFSPQIITTDNTFVSGSCDVVIGIINNTVYDPLQPELDSFKEELDKYFKNHTSPDVDLGDISGINASVVNIQKEIDRLNEVAKNLNESLIDLQELGKYEQYIKWPWYVWLGFIAGLIAIVMVTILLCCMTSCCSCLKGACSCGSCCKFDEDDSEPVLKGVKLHYT

SEQ ID NO: 34 - protein, 1259 aa, Unknown
  Rhinolophus affinis coronavirus spike protein
MFLTCFILSFSLFCVSGDSIDTCETFDDVSPPQQNLVSSSKRGVYYPDDIYRSDVHHLVQDLFLPFNSNVVGLMSFNYRFDNPIIPFKDGVYFAATEKSNVVRGWVFGSTMNNKSQSVIIMNNSTNVVIRACNFQLCDNPFFAVIRPTSQQIETILFENAFNCTFEYVSDSFLMDVGEKPGNFKHLREFIFKNKDGFLNIYSGFQNIDVANGLPSGFSLLKPLLKLPLGLNITNFRVLLTAFIPNIGTWGTSPVAYFVGYLKPTTFMLKYDYNGTIVDAVDCSQHPLAELKCSVKSFEIDKGIYQTSNFRVSPSKEVVRFPNITNLCPFGEVFNATTFPSVYAWERKRISNCVADYSVLYNSTSFSTFKCYGVSAIKLNDLCFSNVYADSFVVKGDDVRQIAPGQTGVIADYNYKLPDDFMGCVLAWNTRNIDATSSGNFNYKYRSLRHGKLRPFERDISNVPFSPDGKPCTPPAFNCYWPLNDYGFYTTNGIGYQPYRVVVLSFELLNAPATVCGPKLSTDLITNQCVNFNFNGLTGTGVLTPSLKRFQPFQQFGRDFSDFTDSVRDPKTLEVLDISPCSFGGVSVITPGTNISSEVAVLYQDVNCTDVPTAIHADQLTPAWRIYSAGVNVFQTQAGCLIGAEHVNASYECDIPIGAGICASYHTASLLRNTDQKSIVAYTMSLGAENSIAYANNSIAIPTNFSISITTEVMPVSMAKTSVDCTMYICGDSQECSNLLLQYGSFCTQLNRALSGIAVEQDKNTQEVFAQVKQIYKTPAIKDFGGFNFSQILPDPSKPTKRSFIEDLLFNKVTLADAGFMKQYGECLGDISARDLICAQKFNGLTVLPPLLTDEMIAAYTAALVSGTATAGWTFGAGAALQIPFAMQMAYRFNGIGVTQNVLYENQKQIANQFNKAISQIQESLTTTSTALGKLQDVVNQNAQALNTLVKQLSSNFGAISSVLNDILSRLDKVEAEVQIDRLITGRLQSLQTYVTQQLIRAAEIRASANLAATKMSECVLGQSKRVDFCGKGYHLMSFPQAAPHGVVFLHVTYVPSQERNFTTAPAICHEGKAYFPREGVFVSNGTSWFITQRNFFSPQLITTDNTFVSGNCDVVIGIINNTVYDPLQPELDSFKEELDKYFKNHTSPDVDLGDISRINASVVNIQKEIDRLNEVAKNLNESLIDLQELGKYEQYIKWPWYVWLGFIAGLIAIVMATILLCCMTSCCSCLKGACSCGSCCKFDEDDSEPVLKGVKLHYT

SEQ ID NO: 35 - protein, 1259 aa, Unknown
  Rhinolophus affinis coronavirus Spike protein
MFLTCFILIFSLFCVSGDSIDTCETFDDVSPPQQNLVSSSKRGVYYPDDIYRSDAHHLVQDLFLPFNSNVVGLMSFNYRFDNPIIPFKDGVYFAATEKSNVVRGWVFGSTMNNKSQSAIIMNNSTNVVIRACNFQLCDNPFFAVIRPTSQQIETILFENAFNCTFEYVSDSFLMDVGEKPGNFKHLREFIFKNKDGFLYIYSGFQNIDVANGLPSGFSLLKPLLKLPLGLNITNFRVLLTAFIPNIGTWGTSPVAYFVGYLKPTTFMLKYDYNGTIVDAVDCSQHPLAELKCSVKSFDIDKGIYQTSNFRVSPSREVVRFPNITNLCPFGEVFNATTFPSVYAWERKRISNCVADYSVLYNSTSFSTFKCYGVSAIKLNDLCFSNVYADSFVVKGDDVRQIAPGQTGVIADYNYKLPDDFMGCVLAWNTRNIDATSSGNFHYKYRSLRHGKLRPFERDISNVPFSPDGKPCTPPAFNCYWPLNDYGFYTTNGIGYQPYRVVVLSFELLNAPATVCGPKLSTDLITNQCVNFNFNGLTGTGVLTPSSKRFQPFQQFGRDVSDFTDSVRDPKTLEVLDISPCSFGGVSVITPGTNISSEVAVLYQDVNCTDVPTAIHADQLTPAWRIYSAGENVFQTQAGCLIGAEHVNASYECDIPIGAGICASYHTASLLRNTGQKSIVAYTMSLGAENSIAYANNSIAIPTNFSISITTEVMPVSMAKTSVDCTMYICGDSQECSNLLLQYGSFCTQLNRALSGIAVEQDSNTQEVFAQVKQIYKTPAIKDFGGFNFSQILPDPSKPTKRSFIEDLLFNKVTLADAGFMKQYGECLGDISARDLICAQKFNGLTVLPPLLTDEMIAAYTAALVSGTATAGWTFGAGAALQIPFAMQMAYRFNGIGVTQNVLYENQKQIANQFNKAISQIQESLTTTSTALGKLQDVVNQNAQALNTLVKQLSSNFGAISSVLNDILSRLDKVEAEVQIDRLITGRLQSLQTYVTQQLIRAAEIRASANLAATKMSECVLGQSKRVDFCGKGYHLMSFPQAAPHGVVFLHVTYVPSQERNFTTAPAICHEGKAYFPREGVFVFNGTSWFITQRNFFSPQLITTDNTFVSGNCDVVIGIINNTVYDPLQPELDSFKEELDKYFKNHTSPDVDLGDISRINASVVNIQKEIDRLNEVAKNLNESLIDLQELGKYEQYIKWPWYVWLGFIAGLIAIVMATILLCCMTSCCSCLKGACSCGSCCKFDEDDSEPVLKGVKLHYT

SEQ ID NO: 36 - protein, 1257 aa, Unknown
  SARS-related coronavirus Spike protein
MKFFILLSLLSFTTAQEGCGILSNKSNPALTQYFSSRRGFYYFDDTFRSSVRVLTTGYFLPFNSNLTGYSSRNSVTGRLIQFDNPNIPFKDGLYFAATERSNVIRGWIFGSTLDNTTQSAVLFNNGTHIVINVCNFYFCQDPMLAVANGSHFKSWVFLNATNCTYNRVHGFEIDPSPNTGSFIHLREHVFRNVDGFLYVYHNYERVDVYDNFPQGFSVLKPIFKLPFGLNITQFKVIMTLFSPTTSSFNADASVYFVGHLKPLTMLAEFDENGTITDAVDCSQDPLSELKCTTKSLTVEKGIYQTSNFRVSPSTEVVRFPNITNLCPFGQVFNASNFPSVYAWERLRISDCVADYAVLYNSSSSFSTFKCYGVSPTKLNDLCFSSVYADYFVVKGDDVRQIAPAQTGVIADYNYKLPDDFTGCVLAWNTNSVDSKSGNNFYYRLFRHGKIKPYERDISNVLYNSAGGTCSSISQLGCYEPLKSYGFTPTVGVGYQPYRVVVLSFELLNAPATVCGPKKSTELVKNKCVNFNFNGLTGTGVLTSSTKKFQPFQQFGRDVSDFTDSVRDPKTFEILDISPCSYGGVSVITPGTNTSKAVAVLYQDVNCTDVPTMIHVEQVSSDWRVYAFNSYGNMFQTQAGCLVGAIYENTTYECDIPIGAGICAKFGSDKIRMGQESIVAYTMSIGEDQSIAYSNNIIAIPTNFSISVTTEVLPVSMTKTSVDCNMYICGDSTECSNLLLQYGSFCTQLNRALSGIAVEQDRNTRDVFAQTKSIYKTPNIKDFGGFNFSQILPDPKKLSYRSFIEDLLYNKVTLSDPGFMKQYGDCLGGINARDLICAQKFNGLTVLPPLLTDDMIAAYTAALISGTATAGYTFGAGAALQIPFAMQMAYRFNGIGVTQNVLYENQKQIANQFNNAISKIQDSLTTTSAALGKLQDVINQNAVALNTLVKQLSSNFGAISSVLNDILSRLDKVEAEVQIDRLITGRLQSLQTYVTQQLIRAAEIRASANLAATKMSECVLGQSKRVDFCGKGYHLMSFPQAAPHGVVFLHVTYVPSQQQNFTTAPAICHNGKAYFPREGVFVMNGTHWFITQRNFYSPQVITTDNTFESGSCDVVIGIINNTVYDPLQPELESFKQELDKYFKNHTSPDVDFGDISGINASVVDIKKEIAHLNEIAKNLNESLIDLQELGKYEQYVKWPWYVWLGFVAGIVAILMSVIMLCCMTNCCSCFKGMCSCGSCCKFDEDHSEPVSGVKLHYT

SEQ ID NO: 37 - protein, 1262 aa, Unknown
  SARS-like coronavirus BatCoV/BB9904/BGR/2008vSpike glycoprotein
MKVLIFLSLLSLVSAQDGCDRFSSKKTPLLTQFPSSKRGLYYFDDIFRSSTRVLTSGHFLPFNSNVTRYTTQHSAPGEWMIYFDNPNITFGDGVYFGAAERSNALRGWIFGSTMDNTTQSAILYNNGTHIVISVCNFNLCEQPMIKVFAGRSYRSLIYTNAANCTYQRVHAFNITTATGNGNLIHFREHVFRNVDGFLYVYHNYELVNLSHTNPSFPAGFSVLKPIFKLPFGLNITFVRAIMTVFSASTSQFEADYSAYFVGHLKPLTMLVDFDENGTITDAVDCSQDPLSELKCTTKSFTVEKGIYQTSNFRVTPTTEVVRFPNITKLCPFDQVFNASSFPSVYAWERVRITDCVANYAVLYNSSVSFSTFQCYGVSPTKLNDLCFSSVYADYFIVKGDDVRQIAPSQTGVIADYNYKLPDDFTGCVIAWNTNALDSNKDFYYRLFRHGKIKPYGRDLSNIPYSPSGTCSTINNLNCFAPLKSYGFTQSSGISFQPYRVVVLSFELLNAPATVCGPKQSTELVKDKCVNFNFNGLTGTGVLTSSSKKFQPFQQFGRDVSDFTDSVRDPKTLEILDIAPCSYGGVSVITPGTNASNSVAVLYQDVNCTDVPTMLHAEQISHDWRVYTFSSDSNIYQTQAGCLIGAAYDNSSYECDIPIGAGICAKYGISSNTRLRSNSQSIVAYTMSLGEDQSIAYSNNTIAIPMNFSISVTTEVLPVSMTKTSVDCNMYICGDSTECSNLLLQYGSFCTQLNRALAGIAVEQDRNTRDVFAQTKAMYKTPSLKDFGGFNFSQILPDPAKPSSRSFIEDLLYNKVTLADPGFMKQYGDCLGGVNARDLICAQKFNGLTVLPPLLTDEMIAAYTAALVSGTATAGFTFGAGAALQIPFAMQMAYRFNGIGVTQNVLYENQKQIANQFNKAISQIQDSLSTTTTALGKLQDVINQNAIALNTLVKQLSSNFGAISSVLNDILSRLDKVEAEVQIDRLITGRLQSLQTYVTQQLIRAAEIRASANIAATKMSECVLGQSKRVDFCGKGYHLMSFPQAAPHGVVFLHVTYVPSQEQNFTTAPAICHGGKAHFPREGVFVTNGTHWFITQRNFYSPQPITTDNTFVSGNCDVVIGIVNNTVYDPLQPELESFKEELDKYFKNHTSQNVSLDGLNNINASVVDIKKEIEHLNEIAKSLNESLIDLQELGKYEQYIKWPWYVWLGFIAGLIAIVMATIMLCCMTSCCSCLKGVCSCASCCKFDEDHSEPVLTGVKLHYT

SEQ ID NO: 38 - protein, 1259 aa, Unknown
  Bat coronavirus BM48-31/BGR/2008 Spike protein
MKFLAFLCLLGFANAQDGKCGTLSNKSPSKLTQTPSSRRGFYYFDDIFRSSIRVLTTGHFLPFNTNLTWYLTLKSNGKQRIYYDNPNINFGDGVYFGLTEKSNVFRGWIFGSTLDNTTQSAVLFNNGTHIVIDVCNFNFCADPMFAVNSGQPYKTWIYTSAANCTYHRAHAFNISTNMNPGKFKHFREHLFKNVDGFLYVYHNYEPIDLNSGFPSGFSVLKPILKLPFGLNITYVKAIMTLFSSTQSNFDADASAYFVGHLKPLTMLVDFDENGTIIDAIDCSQDPLSELKCTTKSFTVEKGIYQTSNFRVTPTTEVVRFPNITQLCPFNEVFNITSFPSVYAWERMRITNCVADYSVLYNSSASFSTFQCYGVSPTKLNDLCFSSVYADYFVVKGDDVRQIAPAQTGVIADYNYKLPDDFTGCVIAWNTNSLDSSNEFFYRRFRHGKIKPYGRDLSNVLFNPSGGTCSAEGLNCYKPLASYGFTQSSGIGFQPYRVVVLSFELLNAPATVCGPKQSTELVKNKCVNFNFNGLTGTGVLTNSTKKFQPFQQFGRDVSDFTDSVRDPKTLEILDIAPCSYGGVSVITPGTNASSSVAVLYQDVNCTDVPTMLHADQISHDWRVYAFRNDGNIFQTQAGCLIGAAYDNSSYECDIPIGAGICAKYTNVSSTLVRSGGHSILAYTMSLGDNQDIVYSNNTIAIPMNFSISVTTEVLPVSMTKTSVDCNMYICGDSTECSNLLLQYGSFCTQLNRALAGIAVEQDRNTRDVFAQTKAMYKTPSLKDFGGFNFSQILPDPAKPSSRSFIEDLLYNKVTLADPGFMKQYGDCLGGVNARDLICAQKFNGLTVLPPLLTDEMIAAYTAALISGTATAGFTFGAGAALQIPFAMQMAYRFNGIGVTQNVLYENQKQIANQFNKAISQIQDSLSTTTTALGKLQDVINQNAIALNTLVKQLSSNFGAISSVLNDILSRLDKVEAEVQIDRLITGRLQSLQTYVTQQLIRAAEIRASANLAATKMSECVLGQSKRVDFCGKGYHLMSFPQAAPHGVVFLHVTYVPSQEQNFTTAPAICHEGKAHFPREGVFVTNGTHWFITQRNFYSPQPITTDNTFVSGNCDVVIGIVNNTVYDPLQPELDSFKEELDKYFKNHTSQNVSLDGLNNINASVVDIKKEIEHLNEIAKSLNESLIDLQELGKYEQYIKWPWYVWLGFIAGLIAIVMATIMLCCMTSCCSCLKGVCSCASCCKFDEDHSEPVLTGVKLHYT

SEQ ID NO: 39 - protein, 1265 aa, Unknown
  Pangolin coronavirus Surface glycoprotein
MLFFFFLHFALVNSQCVNLTGRAAIQPSFTNSSQRGVYYPDTIFRSNTLVLSQGYFLPFYSNVSWYYALTKTNSAEKRVDNPVLDFKDGIYFAATEKSNIVRGWIFGTTLDNTSQSLLIVNNATNVIIKVCNFQFCYDPYLSGYYHNNKTWSTREFAVYSSYANCTFEYVSKSFMLDIAGKSGLFDTLREFVFRNVDGYFKIYSKYTPVNVNSNLPIGFSALEPLVEIPAGINITKFRTLLTIHRGDPMPNNGWTVFSAAYYVGYLAPRTFMLNYNENGTITDAVDCALDPLSEAKCTLKSLTVEKGIYQTSNFRVQPTESIVRFPNITNLCPFGEVFNATTFASVYAWNRKRISNCVADYSVLYNSTSFSTFKCYGVSPTKLNDLCFTNVYADSFVVRGDEVRQIAPGQTGRIADYNYKLPDDFTGCVIAWNSNNLDSKVGGNYNYLYRLFRKSNLKPFERDISTEIYQAGSTPCNGVEGFNCYFPLQSYGFHPTNGVGYQPYRVVVLSFELLNAPATVCGPKQSTNLVKNKCVNFNFNGLTGTGVLTESSKKFLPFQQFGRDIADTTDAVRDPQTLEILDITPCSFGGVSVITPGTNTSNQVAVLYQDVNCTEVPVAIHADQLTPTWSVYSTGSNVFQTRAGCLIGAEHVNNSYECDIPIGAGICASYQTQTNSRSVSSQAIIAYTMSLGAENSVAYANNSIAIPTNFTISVTTEILPVSMTKTSVDCTMYICGDSIECSNLLLQYGSFCTQLNRALTGIAVEQDKNTQEVFAQVKQIYKTPPIKDFGGFNFSQILPDPSKPSKRSFIEDLLFNKVTLADAGFIKQYGDCLGDIAARDLICAQKFNGLTVLPPLLTDEMIAQYTSALLAGTITSGWTFGAGAALQIPFAMQMAYRFNGIGVTQNVLYENQKLIANQFNSAIGKIQDSLSSTASALGKLQDVVNQNAQALNTLVKQLSSNFGAISSVLNDILSRLDKVEAEVQIDRLITGRLQSLQTYVTQQLIRAAEIRASANLAATKMSECVLGQSKRVDFCGKGYHLMSFPQSAPHGVVFLHVTYVPSQEKNFTTTPAICHEGKAHFPREGVFVSNGTHWFVTQRNFYEPQIITTDNTFVSGSCDVVIGIVNNTVYDPLQPELDSFKEELDKYFKNHTSPDVDLGDISGINASVVNIQKEIDRLNEVAKNLNESLIDLQELGKYEQYIKWPWYIWLGFIAGLIAIIMVTIMLCCMTSCCSCLKGCCSCGSCCKFDEDDSEPVLKGVKLHYT

SEQ ID NO: 40 - protein, 1265 aa, Unknown
  Pangolin coronavirus Surface glycoprotein
MLFFFFLHFALVNSQCVNLTGRAAIQPSFTNSSQRGVYYPDTIFRSNTLVLSQGYFLPFYSNVSWYYALTKTNSAEKRVDNPVLDFKDGIYFAATEKSNIVRGWIFGTTLDNTSQSLLIVNNATNVIIKVCNFQFCYDPYLSGYYHNNKTWSTREFAVYSSYANCTFEYVSKSFMLDIAGKSGLFDTLREFVFRNVDGYFKIYSKYTPVNVNSNLPIGFSALEPLVEIPAGINITKFRTLLTIHRGDPMPNNGWTVFSAAYYVGYLAPRTFMLNYNENGTITDAVDCALDPLSEAKCTLKSLTVEKGIYQTSNFRVQPTESIVRFPNITNLCPFGEVFNATTFASVYAWNRKRISNCVADYSVLYNSTSFSTFKCYGVSPTKLNDLCFTNVYADSFVVRGDEVRQIAPGQTGRIADYNYKLPDDFTGCVIAWNSNNLDSKVGGNYNYLYRLFRKSNLKPFERDISTEIYQAGSTPCNGVEGFNCYFPLQSYGFHPTNGVGYQPYRVVVLSFELLNAPATVCGPKQSTNLVKNKCVNFNFNGLTGTGVLTESSKKFLPFQQFGRDIADTTDAVRDPQTLEILDITPCSFGGVSVITPGTNTSNQVAVLYQDVNCTEVPVAIHADQLTPTWRVYSTGSNVFQTRAGCLIGAEHVNNTYECDIPIGAGICASYQTQTNSRSVSSQAIIAYTMSLGAENSVAYANNSIAIPTNFTISVTTEILPVSMTKTSVDCTMYICGDSIECSNLLLQYGSFCTQLNRALTGIAVEQDKNTQEVFAQVKQIYKTPPIKDFGGFNFSQILPDPSKPSKRSFIEDLLFNKVTLADAGFIKQYGDCLGDIAARDLICAQKFNGLTVLPPLLTDEMIAQYTSALLAGTITSGWTFGAGAALQIPFAMQMAYRFNGIGVTQNVLYENQKLIANQFNSAIGKIQDSLSSTASALGKLQDVVNQNAQALNTLVKQLSSNFGAISSVLNDILSRLDKVEAEVQIDRLITGRLQSLQTYVTQQLIRAAEIRASANLAATKMSECVLGQSKRVDFCGKGYHLMSFPQSAPHGVVFLHVTYVPSQEKNFTTTPAICHEGKAHFPREGVFVSNGTHWFVTQRNFYEPQIITTDNTFVSGSCDVVIGIVNNTVYDPLQPELDSFKEELDKYFKNHTSPDVDLGDISGINASVVNIQKEIDRLNEVAKNLNESLIDLQELGKYEQYIKWPWYIWLGFIAGLIAIIMVTIMLCCMTSCCSCLKGCCSCGSCCKFDEDDSEPVLKGVKLHYT

SEQ ID NO: 41 - protein, 1265 aa, Unknown
  Pangolin coronavirus Surface glycoprotein
MLFFFFLHFALVNSQCVNLTGRAAIQPSFTNSSQRGVYYPDTIFRSNTLVLSQGYFLPFYSNVSWYYALTKTNSAEKRVDNPVLDFKDGIYFAATEKSNIVRGWIFGTTLDNTSQSLLIVNNATNVIIKVCNFQFCYDPYLSGYYHNNKTWSTREFAVYSSYANCTFEYVSKSFMLDIAGKSGLFDTLREFVFRNVDGYFKIYSKYTPVNVNSNLPIGFSALEPLVEIPAGINITKFRTLLTIHRGDPMPNNGWTVFSAAYYVGYLAPRTFMLNYNENGTITDAVECALDPLSEAKCTLKSLTVEKGIYQTSNFRVQPTESIVRFPNITNLCPFGEVFNATTFASVYAWNRKRISNCVADYSVLYNSTSFSTFKCYGVSPTKLNDLCFTNVYADSFVVRGDEVRQIAPGQTGRIADYNYKLPDDFTGCVIAWNSNNLDSKVGGNYNYLYRLFRKSNLKPFERDISTEIYQAGSTPCNGVEGFNCYFPLQSYGFHPTNGVGYQPYRVVVLSFELLNAPATVCGPKQSTNLVKNKCVNFNFNGLTGTGVLTESSKKFLPFQQFGRDIADTTDAVRDPQTLEILDITPCSFGGVSVITPGTNTSNQVAVLYQDVNCTEVPVAIHADQLTPTWRVYSTGSNVFQTRAGCLIGAEHVNNTYECDIPIGAGICASYQTQTNSRSVSSQAIIAYTMSLGAENSVAYANNSIAIPTNFTISVTTEILPVSMTKTSVDCTMYICGDSIECSNLLLQYGSFCTQLNRALTGIAVEQDKNTQEVFAQVKQIYKTPPIKDFGGFNFSQILPDPSKPSKRSFIEDLLFNKVTLADAGFIKQYGDCLGDIAARDLICAQKFNGLTVLPPLLTDEMIAQYTSALLAGTITSGWTFGAGAALQIPFAMQMAYRFNGIGVTQNVLYENQKLIANQFNSAIGKIQDSLSSTASALGKLQDVVNQNAQALNTLVKQLSSNFGAISSVLNDILSRLDKVEAEVQIDRLITGRLQSLQTYVTQQLIRAAEIRASANLAATKMSECVLGQSKRVDFCGKGYHLMSFPQSAPHGVVFLHVTYVPSQEKNFTTTPAICHEGKAHFPREGVFVSNGTHWFVTQRNFYEPQIITTDNTFVSGSCDVVIGIVNNTVYDPLQPELDSFKEELDKYFKNHTSPDVDLGDISGINASVVNIQKEIDRLNEVAKNLNESLIDLQELGKYEQYIKWPWYIWLGFIAGLIAIIMVTIMLCCMTSCCSCLKGCCSCGSCCKFDEDDSEPVLKGVKLHYT

SEQ ID NO: 42 - protein, 1269 aa, Unknown
  Bat coronavirus RaTG13 Spike glycoprotein
MFVFLVLLPLVSSQCVNLTTRTQLPPAYTNSSTRGVYYPDKVFRSSVLHLTQDLFLPFFSNVTWFHAIHVSGTNGIKRFDNPVLPFNDGVYFASTEKSNIIRGWIFGTTLDSKTQSLLIVNNATNVVIKVCEFQFCNDPFLGVYYHKNNKSWMESEFRVYSSANNCTFEYVSQPFLMDLEGKQGNFKNLREFVFKNIDGYFKIYSKHTPINLVRDLPPGFSALEPLVDLPIGINITRFQTLLALHRSYLTPGDSSSGWTAGAAAYYVGYLQPRTFLLKYNENGTITDAVDCALDPLSETKCTLKSFTVEKGIYQTSNFRVQPTDSIVRFPNITNLCPFGEVFNATTFASVYAWNRKRISNCVADYSVLYNSTSFSTFKCYGVSPTKLNDLCFTNVYADSFVITGDEVRQIAPGQTGKIADYNYKLPDDFTGCVIAWNSKHIDAKEGGNFNYLYRLFRKANLKPFERDISTEIYQAGSKPCNGQTGLNCYYPLYRYGFYPTDGVGHQPYRVVVLSFELLNAPATVCGPKKSTNLVKNKCVNFNFNGLTGTGVLTESNKKFLPFQQFGRDIADTTDAVRDPQTLEILDITPCSFGGVSVITPGTNASNQVAVLYQDVNCTEVPVAIHADQLTPTWRVYSTGSNVFQTRAGCLIGAEHVNNSYECDIPIGAGICASYQTQTNSRSVASQSIIAYTMSLGAENSVAYSNNSIAIPTNFTISVTTEILPVSMTKTSVDCTMYICGDSTECSNLLLQYGSFCTQLNRALTGIAVEQDKNTQEVFAQVKQIYKTPPIKDFGGFNFSQILPDPSKPSKRSFIEDLLFNKVTLADAGFIKQYGDCLGDIAARDLICAQKFNGLTVLPPLLTDEMIAQYTSALLAGTITSGWTFGAGAALQIPFAMQMAYRFNGIGVTQNVLYENQKLIANQFNSAIGKIQDSLSSTASALGKLQDVVNQNAQALNTLVKQLSSNFGAISSVLNDILSRLDKVEAEVQIDRLITGRLQSLQTYVTQQLIRAAEIRASANLAATKMSECVLGQSKRVDFCGKGYHLMSFPQSAPHGVVFLHVTYVPAQEKNFTTAPAICHDGKAHFPREGVFVSNGTHWFVTQRNFYEPQIITTDNTFVSGSCDVVIGIVNNTVYDPLQPELDSFKEELDKYFKNHTSPDVDLGDISGINASVVNIQKEIDRLNEVAKNLNESLIDLQELGKYEQYIKWPWYIWLGFIAGLIAIIMVTIMLCCMTSCCSCLKGCCSCGSCCKFDEDDSEPVLKGVKLHYT

SEQ ID NO: 43 - protein, 1273 aa, Unknown
  SARS-CoV2 Surface glycoprotein
MFVFLVLLPLVSSQCVNLTTRTQLPPAYTNSFTRGVYYPDKVFRSSVLHSTQDLFLPFFSNVTWFHAIHVSGTNGTKRFDNPVLPFNDGVYFASTEKSNIIRGWIFGTTLDSKTQSLLIVNNATNVVIKVCEFQFCNDPFLGVYYHKNNKSWMESEFRVYSSANNCTFEYVSQPFLMDLEGKQGNFKNLREFVFKNIDGYFKIYSKHTPINLVRDLPQGFSALEPLVDLPIGINITRFQTLLALHRSYLTPGDSSSGWTAGAAAYYVGYLQPRTFLLKYNENGTITDAVDCALDPLSETKCTLKSFTVEKGIYQTSNFRVQPTESIVRFPNITNLCPFGEVFNATRFASVYAWNRKRISNCVADYSVLYNSASFSTFKCYGVSPTKLNDLCFTNVYADSFVIRGDEVRQIAPGQTGKIADYNYKLPDDFTGCVIAWNSNNLDSKVGGNYNYLYRLFRKSNLKPFERDISTEIYQAGSTPCNGVEGFNCYFPLQSYGFQPTNGVGYQPYRVVVLSFELLHAPATVCGPKKSTNLVKNKCVNFNFNGLTGTGVLTESNKKFLPFQQFGRDIADTTDAVRDPQTLEILDITPCSFGGVSVITPGTNTSNQVAVLYQDVNCTEVPVAIHADQLTPTWRVYSTGSNVFQTRAGCLIGAEHVNNSYECDIPIGAGICASYQTQTNSPRRARSVASQSIIAYTMSLGAENSVAYSNNSIAIPTNFTISVTTEILPVSMTKTSVDCTMYICGDSTECSNLLLQYGSFCTQLNRALTGIAVEQDKNTQEVFAQVKQIYKTPPIKDFGGFNFSQILPDPSKPSKRSFIEDLLFNKVTLADAGFIKQYGDCLGDIAARDLICAQKFNGLTVLPPLLTDEMIAQYTSALLAGTITSGWTFGAGAALQIPFAMQMAYRFNGIGVTQNVLYENQKLIANQFNSAIGKIQDSLSSTASALGKLQDVVNQNAQALNTLVKQLSSNFGAISSVLNDILSRLDKVEAEVQIDRLITGRLQSLQTYVTQQLIRAAEIRASANLAATKMSECVLGQSKRVDFCGKGYHLMSFPQSAPHGVVFLHVTYVPAQEKNFTTAPAICHDGKAHFPREGVFVSNGTHWFVTQRNFYEPQIITTDNTFVSGNCDVVIGIVNNTVYDPLQPELDSFKEELDKYFKNHTSPDVDLGDISGINASVVNIQKEIDRLNEVAKNLNESLIDLQELGKYEQYIKWPWYIWLGFIAGLIAIVMVTIMLCCMTSCCSCLKGCCSCGSCCKFDEDDSEPVLKGVKLHYT

SEQ ID NO: 44 - protein, 1261 aa, Unknown
  SARS-CoV2 VOC_May_01
MFVFFVLLPLVFIQCVSFTNIIHLPSSYINSFTRGVYYPDKVFRSSVLYSIRDFFLPFFSNVTWFHVIRTNVIKRFANPVLPFNDGVYFAFIDKFNIIRGWIFGTTLDSKTQSLLIVNNATNVVIKVCEFQFCNYPFYKNNKSCTKSESRVYSSATNCTFEYVSKPFFIDLVVKQGNFKNFSEFVFKNIDGYFKIYSKHTPNLVRGFPQGFLVLEPLVDLPIGINITRFQILYRSYLTPGGFFLGLTAGSAAYYVGYLQLRTFLLKYNENGTITDAVDCALDPLSEIKCTLKSFILEKGIYQTSNFRVQPTESIVRFPNITNLCPFGEVFNATRFASVYAWNRKRISNCVADYSFLYNSASFSTFKCYGVSLTKLNDLCFTNVYADSFVIRGDEVRQIAPGKTGNIADYNYKLPDDFTGCVIAWNSKKLDSKVGGNYKYRFRLFRKSNLKPFERDISTEIYQAGNKPCNGVKGFNCYSPLQPYGFQPTYGVGYQPYRVVVLSFELLHSPSTVCGPKKSTNLVKNKCVNFNFNGLIGTGVLTESNKNFLPFQQFGRDIDDITDAVRDPQTLDILDITPCSFGGVSVITPGTNTSNQVAVLYHGVNCTEVPFAIHSDQLTPTWRVYSTGFNVFQTRAGCLIGVEYVNNSYECDIPIGAGICATYHTHTKSHRRARSVVSQSIIAYTMSLGVENLVVYSNNSIAIPINFTISVITEILPVSMAKTSVDCTMYICGDSTECSNLLLQYGSFCTQLNRALTVIAIEQDKNTQQVFAQVKQIYKIPPIKYFGGFNFSQILPDSSKSSKRSFIEDLFFNKVTLADAGFIKQYGDCLGDISARDLICAQKFNGLNVLPPLLTDEMIAQYTSALLSGTITSGWTLGAGAALQIPFSMQMAYRFNGIGVTQNVLYENQKLIANQFNSAIGKIQYSFFFTAPALGKLQHVVNQNARALNTLVKQLSSNFGAISSVLNDILARLDKVEAEVQIDRLITGRLQSLQTYVTQQLIRAAEIRSSANLAAIKMSECVLGQSKRVDFCGKGYHLMSFPQSAPHGVVFFHVTYVPALENNFTTSPAICHYGKAHFPREGVFVSNGTYWFLTQRNFYEPQIITIHNTFLSGNCDVVIGIVNNTVYDPLQPELDSFKEELDKYFKNHTSSYVDLVDISGINASFVNIQKEIDRLNEVANNLNESLIDLQQLGKYEQYIKWPWYIWLCFIAGLIAILIVTIMLCCITSCCSCLKGCCSCGFCCKFDEDDSELLLKGVKLHYT

SEQ ID NO: 45 - protein, 1261 aa, Unknown
  SARS-CoV2 VOC Whole VOC surface glycoprotein
MFVFFVLLPLVFIQCVNFTIIIHLPSSYINSFTRGVYYPDKVFRSSVLYSIRDFFLPFFSNVTWFHVIRTNVIKRFANPVLPFNDGVYFASIDKFNIIRGWIFGTTLDSKTQSLLIVNNATNVVIKVCEFQFCNYPFYKNNKSCTESESRVYSSATNCTFEYVSKPFFIDLVVKQGNFKNFSEFVFKNIDGYFKIYSKHTPNLVRGFPQGFLVLEPLVDLPIGINITRFQTLYRSYLTPGGFFLGLTAGSAAYYVGYLQLRTFLLKYNENGTITDAVDCALDPLSEIKCTLKSFILEKGIYQTSNFRVQPTESIVRFPNITNLCPFGEVFNATRFASVYAWNRKRISNCVADYSFLYNSASFSTFKCYGVSLTKLNDLCFTNVYADSFVIRGDEVRQIAPGKTGNIADYNYKLPDDFTGCVIAWNSKKLDSKVGGNYNYRFRLFRKSNLKPFERDISTEIYQAGNKPCNGVKGFNCYSPLQPYGFQPTYGVGYQPYRVVVLSFELLHSPSTVCGPKKSTNLVKNKCVNFNFNGLIGTGVLTESNKNFLPFQQFGRDIDDITDAVRDPQTLDILDITPCSFGGVSVITPGTNTSNQVAVLYHGVNCTEVPFAIHSDQLTPTWRVYSTGFNVFQTRAGCLIGVQYVNNSYECDIPIGAGICATYHTHTKSHRRARSVVSQSIIAYTMSLGVENLVVYSNNSIAIPINFTISVITEILPVSMAKTSVDCTMYICGDSTECSNLLLQYGSFCTQLNRALTVIAIEQDKNTQQVFAQVKQIYKIPPIKYFGGFNFSQILPDSSKSSKRSFIEDLFFNKVTLADAGFIKQYGDCLGDISARDLICAQKFNGLNVLPPLLTDEMIAQYTSALLSGTITSGWTLGAGAALQIPFSMQMAYRFNGIGVTQNVLYENQKLIANQFNSAIGKIQYSFFFTASALGKLQHVVNQNARALNTLVKQLSSNFGAISSVLNDILARLDKVEAEVQIDRLITGRLQSLQTYVTQQLIRAAEIRSSANLAAIKMSECVLGQSKRVDFCGKGYHLMSFPQSAPHGVVFFHVTYVPALENNFTTSPAICHYGKAHFPREGVFVSNGTHWFLTQRNFYEPQIITIHNTFLSGNCDVVIGIVNNTVYDPLQPELDSFKEELDKYFKNHTSSYVDLVDISGINASFVNIQKEIDRLNEVANNLNESLIDLQQLGKYEQYIKWPWYIWLCFIAGFIAILIVTIMLCCITSCCSCLKGCCSCGFCCKFDEDDSELLLKGVKLHYT

SEQ ID NO: 46 - protein, 1267 aa, Unknown
  Pangolin coronavirus Spike protein
MFVFLFVLPLVSSQCVNLTTRTGIPPGYTNSSTRGVYYPDKVFRSSILHLTQDLFLPFFSNVTWFNTINYQGGFKKFDNPVLPFNDGVYFASTEKSNIIRGWIFGTTLDARTQSLLIVNNATNVVIKVCEFQFCTDPFLGVYYHNNNKTWVENEFRVYSSANNCTFEYISQPFLMDLEGKQGNFKNLREFVFKNVDGYFKIYSKHTPIDLVRDLPRGFAALEPLVDLPIGINITRFQTLLALHRSYLTPGNLESGWTTGAAAYYVGYLQQRTFLLSYNQNGTITDAVDCSLDPLSETKCTLKSLTVEKGIYQTSNFRVQPTISIVRFPNITNLCPFGEVFNASKFASVYAWNRKRISNCVADYSVLYNSTSFSTFKCYGVSPTKLNDLCFTNVYADSFVVKGDEVRQIAPGQTGVIADYNYKLPDDFTGCVIAWNSVKQDALTGGNYGYLYRLFRKSKLKPFERDISTEIYQAGSTPCNGQVGLNCYYPLERYGFHPTTGVNYQPFRVVVLSFELLNGPATVCGPKLSTTLVKDKCVNFNFNGLTGTGVLTTSKKQFLPFQQFGRDISDTTDAVRDPQTLEILDITPCSFGGVSVITPGTNTSNQVAVLYQDVNCTEVPMAIHAEQLTPAWRVYSAGANVFQTRAGCLVGAEHVNNSYECDIPVGAGICASYHSMSSLRSVNQRSIIAYTMSLGAENSVAYSNNSIAIPTNFTISVTTEILPVSMTKTSVDCTMYICGDSIECSNLLLQYGSFCTQLNRALTGIAVEQDKNTQEVFAQVKQIYKTPPIKDFGGFNFSQILPDPSKPSKRSFIEDLLFNKVTLADAGFIKQYGDCLGDIAARDLICAQKFNGLTVLPPLLTDEMIAQYTSALLAGTITSGWTFGAGAALQIPFAMQMAYRFNGIGVTQNVLYENQKLIANQFNSAIGKIQDSLSSTASALGKLQDVVNQNAQALNTLVKQLSSNFGAISSVLNDILSRLDKVEAEVQIDRLITGRLQSLQTYVTQQLIRAAEIRASANLAATKMSECVLGQSKRVDFCGKGYHLMSFPQSAPHGVVFLHVTYVPAQEKNFTTAPAICHEGKAHFPREGVFVSNGTHWFITQRNFYEPQIITTDNTFVSGSCDVVIGIVNNTVYDPLQPELDSFKEELDKYFKNHTSPDVDLGDISGINASVVNIQKEIDRLNEVAKNLNESPIDLQELGKYEQYIKWPWYIWLGFIAGLIAIIMVTIMLCCMTSCCSCLKGCCSCGSCCKFDEDDSEPVLKGVKLHYT

SEQ ID NO: 47 - protein, 1265 aa, Unknown
  Pangolin coronavirus Spike protein (Genbank: QIA48623)
MFVFLFVLPLVSSQCVNLTTRTGIQPGYTNSSTRGVYYPDKVFRSSILHLTQDLFLPFFSNVTWFNTINYQGGFKKFDNPVLPFNDGVYFASTEKSNIIRGWIFGTTLDARTQSLLIVNNATNVVIKVCEFQFCTDPFLGVYYHNNNKTWVENEFRVYSSANNCTFEYISQPFLMDLEGKQGNFKNLREFVFKNVDGYFKIYSKHTPIDLVRDLPRGFAALEPLVDLPIGINITRFQTLLALHRSYLTPGKLESGWTTGAAAYYVGYLQQRTFLLSYNQNGTITDAVDCSLDPLSETKCTLKSLTVEKGIYQTSNFRVQPTISIVRFPNITNLCPFGEVFNASKFASVYAWNRKRISNCVADYSVLYNSTSFSTFKCYGVSPTKLNDLCFTNVYADSFVVKGDEVRQIAPGQTGVIADYNYKLPDDFTGCVIAWNSVKQDALTGGNYLYRLFRKSKLKPFERDISTEIYQAGSTPCNGQVGLNCYYPLERYGFHPTTGVNYQPFRVVVLSFELLNGPATVCGPKLSTTLVKDKCVNFNFNGLTGTGVLTTSKKQFLPFQQFGRDISDTTDAVRDPQTLEILDITPCSFGGVSVITPGTNTSNQVAVLYQDVNCTEVPMAIHAEQLTPAWRVYSAGANVFQTRAGCLVGAEHVNNSYECDIPVGAGICASYHSMSSLRSVNQRSIIAYTMSLGAENSVAYSNNSIAIPTNFTISVTTEILPVSMTKTSVDCTMYICGDSIECSNLLLQYGSFCTQLNRALTGIAVEQDKNTQEVFAQVKQIYKTPPIKDFGGFNFSQILPDPSKPSKRSFIEDLLFNKVTLADAGFIKQYGDCLGDIAARDLICAQKFNGLTVLPPLLTDEMIAQYTSALLAGTITSGWTFGAGAALQIPFAMQMAYRFNGIGVTQNVLYENQKLIANQFNSAIGKIQDSLSSTASALGKLQDVVNQNAQALNTLVKQLSSNFGAISSVLNDILSRLDKVEAEVQIDRLITGRLQSLQTYVTQQLIRAAEIRASANLAATKMSECVLGQSKRVDFCGKGYHLMSFPQSAPHGVVFLHVTYVPAQEKNFTTAPAICHEGKAHFPREGVFVSNGTHWFITQRNFYEPQIITTDNTFVSGSCDVVIGIVNNTVYDPLQPELDSFKEELDKYFKNHTSPDVDLGDISGINASVVNIQKEIDRLNEVAKNLNESLIDLQELGKYEQYIKWPWYIWLGFIAGLIAIIMVTIMLCCMTSCCSCLKGCCSCGSCCKFDEDDSEPVLKGVKLHYT

SEQ ID NO: 48 - protein, 1267 aa, Unknown
  Pangolin coronavirus Spike protein
MFVFLFVLPLVSSQCVNLTTRTGIPPGYTNSSTRGVYYPDKVFRSSILHLTQDLFLPFFSNVTWFNTITYQGGSKKFDNPVLPFNDGVYFASTEKSNIIRGWIFGTTLDARTQSLLIVNNATNVVIKVCEFQFCTDPFLGVYYHNNNKTWVENEFRVYSSANNCTFEYISQPFLMDLEGKQGNFKNLREFVFKNVDGYFKIYSKHTPIDLVRDLPRGFAALEPLVDLPIGINITRFQTLLALHRSYLTPGKLESGWTTGAAAYYVGYLQQRTFLLSYNQNGTITDAVDCSLDPLSETKCTLKSLTVEKGIYQTSNFRVQPTISIVRFPNITNLCPFGEVFNASKFASVYAWNRKRISNCVADYSVLYNSTSFSTFKCYGVSPTKLNDLCFTNVYADSFVVKGDEVRQIAPGQTGVIADYNYKLPDDFTGCVIAWNSVKQDALTGDNYGYLYRLFRKSKLKPFERDISTEIYQAGSTPCNGQVGLNCYYPLERYGFHPTTGVNYQPFRVVVLSFELLNGPATVCGPKLSTTLVKDKCVNFNFNGLTGTGVLTTSKKQFLPFQQFGRDISDTTDAVRDPQTLEILDITPCSFGGVSVITPGTNTSNQVAVLYQDVNCTEVPMAIHAEQLTPAWRVYSAGANVFQTRAGCLVGAEHVNNSYECDIPVGAGICASYHSMSSFRSVNQRSIIAYTMSLGAENSVAYSNNSIAIPTNFTISVTTEILPVSMTKTSVDCTMYICGDSIECSNLLLQYGSFCTQLNRALTGIAVEQDKNTQEVFAQVKQIYKTPPIKDFGGFNFSQILPDPSKPSKRSFIEDLLFNKVTLADAGFIKQYGDCLGDIAARDLICAQKFNGLTVLPPLLTDEMIAQYTSALLAGTITSGWTFGAGAALQIPFAMQMAYRFNGIGVTQNVLYENQKLIANQFNSAIGKIQDSLSSTASALGKLQDVVNQNAQALNTLVKQLSSNFGAISSVLNDILSRLDKVEAEVQIDRLITGRLQSLQTYVTQQLIRAAEIRASANLAATKMSECVLGQSKRVDFCGKGYHLMSFPQSAPHGVVFLHVTYVPAQEKNFTTAPAICHEGKAHFPREGVFVSNGTHWFITQRNFYEPQIITTDNTFVSGSCDVVIGIVNNTVYDPLQPELDSFKEELDKYFKNHTSPDVDLGDISGINASVVNIQKEIDRLNEVAKNLNESLIDLQELGKYEQYIKWPWYIWLGFIAGLIAIIMVTIMLCCMTSCCSCLKGCCSCGSCCKFDEDDSEPVLKGVKLHYT

SEQ ID NO: 49 - protein, 1267 aa, Unknown
  Pangolin coronavirus Spike protein
MFVFLFVLPLVSSQCVNLTTRTGIPPGYTNSSTRGVYYPDKVFRSSILHLTQDLFLPFFSNVTWFNTINYQGGFKKFDNPVLPFNDGVYFASTEKSNIIRGWIFGTTLDARTQSLLIVNNATNVVIKVCEFQFCTDPFLGVYYHNNNKTWVENEFRVYSSANNCTFEYISQPFLMDLEGKQGNFKNLREFVFKNVDGYFKIYSKHTPIDLVRDLPRGFAALEPLVDLPIGINITRFQTLLALHRSYLTPGKLESGWTTGAAAYYVGYLQQRTFLLSYNQNGTITDAVDCSLDPLSETKCTLKSLTVEKGIYQTSNFRVQPTISIVRFPNITNLCPFGEVFNASKFASVYAWNRKRISNCVADYSVLYNSTSFSTFKCYGVSPTKLNDLCFTNVYADSFVVKGDEVRQIAPGQTGVIADYNYKLPDDFTGCVIAWNSVKQDALTGGNYGYLYRLFRKSKLKPFERDISTEIYQAGSTPCNGQVGLNCYYPLERYGFHPTTGVNYQPFRVVVLSFELLNGPATVCGPKLSTTLVKDKCVNFNFNGLTGTGVLTTSKKQFLPFQQFGRDISDTTDAVRDPQTLEILDITPCSFGGVSVITPGTNTSNQVAVLYQDVNCTEVPMAIHAEQLTPAWRVYSAGANVFQTRAGCLVGAEHVNNSYECDIPVGAGICASYHSMSSFRSVNQRSIIAYTMSLGAENSVAYSNNSIAIPTNFTISVTTEILPVSMTKTSVDCTMYICGDSIECSNLLLQYGSFCTQLNRALTGIAVEQDKNTQEVFAQVKQIYKTPPIKDFGGFNFSQILPDPSKPSKRSFIEDLLFNKVTLADAGFIKQYGDCLGDIAARDLICAQKFNGLTVLPPLLTDEMIAQYTSALLAGTITSGWTFGAGAALQIPFAMQMAYRFNGIGVTQNVLYENQKLIANQFNSAIGKIQDSLSSTASALGKLQDVVNQNAQALNTLVKQLSSNFGAISSVLNDILSRLDKVEAEVQIDRLITGRLQSLQTYVTQQLIRAAEIRASANLAATKMSECVLGQSKRVDFCGKGYHLMSFPQSAPHGVVFLHVTYVPAQEKNFTTAPAICHEGKAHFPREGVFVSNGTHWFITQRNFYEPQIITTDNTFVSGSCDVVIGIVNNTVYDPLQPELDSFKEELDKYFKNHTSPDVDLGDISGINASVVNIQKEIDRLNEVAKNLNESLIDLQELGKYEQYIKWPWYIWLGFIAGLIAIIMVTIMLCCMTSCCSCLKGCCSCGSCCKFDEDDSEPVLKGVKLHYT

SEQ ID NO: 50 - protein, 1269 aa, Unknown
  Pangolin coronavirus Spike protein
  misc_feature (86)..(86): Xaa can be any naturally occurring amino acid
  misc_feature (515)..(515): Xaa can be any naturally occurring amino acid
MFVFLFVLPLVSSQCVNLTTRTGIPPGYTNSSTRGVYYPDKVFRSSILHLTQDLFLPFFSNVTWFNTIHLNYQGGFKKFDNPVLPXNDGVYFASTEKSNIIRGWIFGTTLDARTQSLLIVNNATNVVIKVCEFQFCTDPFLGVYYHNNNKTWVENEFRVYSSANNCTFEYISQPFLMDLEGKQGNFKNLREFVFKNVDGYFKIYSKHTPIDLVRDLPRGFAALEPLVDLPIGINITRFQTLLALHRSYLTPGKLESGWTTGAAAYYVGYLQQRTFLLSYNQNGTITDAVDCSLDPLSETKCTLKSLTVEKGIYQTSNFRVQPTISIVRFPNITNLCPFGEVFNASKFASVYAWNRKRISNCVADYSVLYNSTSFSTFKCYGVSPTKLNDLCFTNVYADSFVVKGDEVRQIAPGQTGVIADYNYKLPDDFTGCVIAWNSVKQDALTGGNYGYLYRLFRKSKLKPFERDISTEIYQAGSTPCNGQVGLNCYYPLERYGFHPTTGVNYQPFRVVVLSXELLNGPATVCGPKLSTTLVKDKCVNFNFNGLTGTGVLTTSKKQFLPFQQFGRDISDTTDAVRDPQTLEILDITPCSFGGVSVITPGTNTSNQVAVLYQDVNCTEVPMAIHAEQLTPAWRVYSAGANVFQTRAGCLVGAEHVNNSYECDIPVGAGICASYHSMSSFRSVNQRSIIAYTMSLGAENSVAYSNNSIAIPTNFTISVTTEILPVSMTKTSVDCTMYICGDSIECSNLLLQYGSFCTQLNRALTGIAVEQDKNTQEVFAQVKQIYKTPPIKDFGGFNFLQILPDPSKPSKRSFIEDLLFNKVTLADAGFIKQYGDCLGDIAARDLICAQKFNGLTVLPPLLTDEMIAQYTSALLAGTITSGWTFGAGAALQIPFAMQMAYRFNGIGVTQNVLYENQKLIANQFNSAIGKIQDSLSSTASALGKLQDVVNQNAQALNTLVKQLSSNFGAISSVLNDILSRLDKVEAEVQIDRLITGRLQSLQTYVTQQLIRAAEIRASANLAATKMSECVLGQSKRVDFCGKGYHLMSFPQSAPHGVVFLHVTYVPAQEKNFTTAPAICHEGKAHFPREGVFVSNGTHWFITQRNFYEPQIITTDNTFVSGSCDVVIGIVNNTVYDPLQPELDSFKEELDKYFKNHTSPDVDLGDISGINASVVNIQKEIDRLNEVAKNLNESLIDLQELGKYEQYIKWPWYIWLGFIAGLIAIIMVTIMLCCMTSCCSCLKGCCSCGSCCKFDEDDSEPVLKGVKLHYT

SEQ ID NO: 51 - protein, 1235 aa, Unknown
  SC2r-CoV batACE2 Spike
MFILVLLNVLSVYGCVNITYGSHHLYVSSRTRGVYYPDDAFRSSTNVLHEGFFLPFDSNVTWYSFWNQKYSVATSPFGDGVYFSTIDKSNVVRGWVFGTTLDNDTQSVLLYNDGTHVRVEVCTFHFCPTPVFSASSPHLYSSAFNCTLNYTLASVRADFTEVDGSFKTIREFVFKLQDGSLNVYYASTSYVLAIGATSQLPSGVTPLVPLWKIPIGLNITNFKTLVYLRSDNTPLQAAYVVGHLKRRTMMFKYDENGTIVDAIDCALDPLSETKCTLRSFIVEKGIYQTSNFRVQPQDTVVRFPNITNLCPFSEVFNATTFASVYAWNRKRISNCVADYSVLYNSTSFSTFQCYGVSSTKLNDLCFTNVYADSFVVRGDEVRQIAPGQTGVIADYNYKLPDDFTGCVLAWNSRNQDASTSGNFNYYYRIWRSEKLRPFERDIAHYDYQVGTQFKSSLKNYGFYSSAGDSHQPYRVVVLSFELLNAPATVCGPKQSTELIKNKCVNFNFNGLTGTGVLTDSNKKFQSFQQFGRDVSDFTDSVKDPKTLEVLDITPCSYGGVSVITPGTNASTQVAVLYQDVNCTDVPTAIHAEQLTPSWRVYSTGTNMFQTQAGCLIGAEHVNNSYDCDIPIGAGICATYHTPSMLRSANNNKRIVAYVMSLGAENSVAYSNNTIAIPTNFTISVTTEVMPVSMTKTSVDCTMYICGDSVECSTLLLQYGSFCTQLNRALTGIAVEQDKNTQEVFAQVKQIYKTPDIKDFGGFNFSQILPDPSKPSKRSFIEDLLFNKVTLADAGFVKQYGDCLGDIQARDLICAQKFNGLTVLPPLLTDEMIAAYTAALISGTATAGWTFGAGAALQIPFAMQMAYRFNGIGVTQNVLYENQKLIANQFNSAIGKIQESLTSTASALGKLQDVVNQNAQALNTLVKQLSSNFGAISSVLNDIISRLDKVEAEVQIDRLITGRLQSLQTYVTQQLIRAAEIRASANLAATKMSECVLGQSKRVDFCGKGYHLMSFPQAAPHGVVFLHVTYIPSQERNFTTAPAICHEGKAHFPREGVFVSNGTHWFITQRNFYEPQIITTDNTFVSGTCDVVIGIVNNTVYDPLQPELESFKDELDKYFKNHTSPDIDLGDISGINASVVDIQKEIDILKDVAKNLNESLINLQELGKYEQYIKWPWYVWLGFIAGLIAIIMVTIMLCCMTSCCSCLKGCCSCGSCCKFDEDDSEPVLKGVKLHYT

SEQ ID NO: 52 - protein, 1235 aa, Unknown; identical to SEQ ID NO: 51
  Bats SARS coronavirus Rc-0319 Spike

SEQ ID NO: 53 - protein, 269 aa, Unknown
  Bat SARS-like coronavirus Rs7327 S protein RBD
SNFRVAPSKEVVRFPNITNLCPFGEVFNATTFPSVYAWERKRISNCVADYSVLYNSTSFSTFKCYGVSATKLNDLCFSNVYADSFVVKGDDVRQIAPGQTGVIADYNYKLPDDFMGCVLAWNTRNIDATSTGNYNYKYRSLRHGKLRPFERDISNVPFSPDGKPCTPPAFNCYWPLNDYGFFTTNGIGYQPYRVVVLSFELLNAPATVCGPKLSTDLIKNQCVNFNFNGLTGTGVLTSSSKRFQPFQQFGRDVSDFTDSVRDPKTSEIL

SEQ ID NO: 54 - protein, 269 aa, Unknown
  Coronavirus BtRs-BetaCoV/YN2018B S protein RBD
SNFRVAPSKEVVRFPNITNLCPFGEVFNATTFPSVYAWERKRISNCVADYSVLYNSTSFSTFKCYGVSATKLNDLCFSNVYADSFVVKGDDVRQIAPGQTGVIADYNYKLPDDFMGCVLAWNTRNIDATSTGNYNYKYRSLRHGKLRPFERDISNVPFSPDGKPCTPPAFNCYWPLNDYGFFTTNGIGYQPYRVVVLSFELLNAPATVCGPKLSTDLIKNQCVNFNFNGLTGTGVLTPSSKRFQPFQQFGRDVSDFTDSVRDPKTSEIL

SEQ ID NO: 55 - protein, 269 aa, Unknown
  Rhinolophus affinis coronavirus LYRa11 S protein RBD
SNFRVSPSKEVVRFPNITNLCPFGEVFNATTFPSVYAWERKRISNCVADYSVLYNSTSFSTFKCYGVSAIKLNDLCFSNVYADSFVVKGDDVRQIAPGQTGVIADYNYKLPDDFMGCVLAWNTRNIDATSSGNFNYKYRSLRHGKLRPFERDISNVPFSPDGKPCTPPAFNCYWPLNDYGFYTTNGIGYQPYRVVVLSFELLNAPATVCGPKLSTDLITNQCVNFNFNGLTGTGVLTPSLKRFQPFQQFGRDFSDFTDSVRDPKTLEVL

SEQ ID NO: 56 - protein, 269 aa, Unknown
  Rhinolophus affinis coronavirus LYRa3 S protein RBD
SNFRVSPSREVVRFPNITNLCPFGEVFNATTFPSVYAWERKRISNCVADYSVLYNSTSFSTFKCYGVSAIKLNDLCFSNVYADSFVVKGDDVRQIAPGQTGVIADYNYKLPDDFMGCVLAWNTRNIDATSSGNFHYKYRSLRHGKLRPFERDISNVPFSPDGKPCTPPAFNCYWPLNDYGFYTTNGIGYQPYRVVVLSFELLNAPATVCGPKLSTDLITNQCVNFNFNGLTGTGVLTPSSKRFQPFQQFGRDVSDFTDSVRDPKTLEVL

SEQ ID NO: 57 - protein, 269 aa, Unknown
  SARS coronavirus Tor2 Spike glycoprotein RBD
SNFRVVPSGDVVRFPNITNLCPFGEVFNATKFPSVYAWERKKISNCVADYSVLYNSTFFSTFKCYGVSATKLNDLCFSNVYADSFVVKGDDVRQIAPGQTGVIADYNYKLPDDFMGCVLAWNTRNIDATSTGNYNYKYRYLRHGKLRPFERDISNVPFSPDGKPCTPPALNCYWPLNDYGFYTTTGIGYQPYRVVVLSFELLNAPATVCGPKLSTDLIKNQCVNFNFNGLTGTGVLTPSSKRFQPFQQFGRDVSDFTDSVRDPKTSEIL

SEQ ID NO: 58 - protein, 269 aa, Unknown
  Bat SARS-like coronavirus Rs3367 S protein RBD
SNFRVAPSKEVVRFPNITNLCPFGEVFNATTFPSVYAWERKRISNCVADYSVLYNSTSFSTFKCYGVSATKLNDLCFSNVYADSFVVKGDDVRQIAPGQTGVIADYNYKLPDDFTGCVLAWNTRNIDATQTGNYNYKYRSLRHGKLRPFERDISNVPFSPDGKPCTPPAFNCYWPLNDYGFYITNGIGYQPYRVVVLSFELLNAPATVCGPKLSTDLIKNQCVNFNFNGLTGTGVLTPSSKRFQPFQQFGRDVSDFTDSVRDPKTSEIL

SEQ ID NO: 59 - protein, 269 aa, Unknown
  SARS-like coronavirus WIV16 S protein RBD
SNFRVAPSKEVVRFPNITNLCPFGEVFNATTFPSVYAWERKRISNCVADYSVLYNSTSFSTFKCYGVSATKLNDLCFSNVYADSFVVKGDDVRQIAPGQTGVIADYNYKLPDDFTGCVLAWNTRNIDATQTGNYNYKYRSLRHGKLRPFERDISNVPFSPDGKPCTPPAFNCYWPLNDYGFYITNGIGYQPYRVVVLSFELLNAPATVCGPKLSTDLIKNQCVNFNFNGLTGTGVLTPSSKRFQPFQQFGRDVLDFTDSVRDPKTSEIL

SEQ ID NO: 60 - protein, 269 aa, Unknown
  Bat SARS-like coronavirus Rs4231 S protein RBD
SNFRVAPSKEVVRFPNITNLCPFGEVFNATTFPSVYAWERKRISNCVADYSVLYNSTSFSTFKCYGVSATKLNDLCFSNVYADSFVVKGDDVRQIAPGQTGVIADYNYKLPDDFLGCVLAWNTNSKDSSTSGNYNYLYRWVRRSKLNPYERDLSNDIYSPGGQSCSAIGPNCYNPLRPYGFFTTAGVGHQPYRVVVLSFELLNAPATVCGPKLSTDLIKNQCVNFNFNGLTGTGVLTSSSKRFQPFQQFGRDVSDFTDSVRDPKTSEIL

SEQ ID NO: 61 - protein, 269 aa, Unknown
  Bat SARS-like coronavirus RsSHC014 S protein RBD
SNFRVAPSKEVVRFPNITNLCPFGEVFNATTFPSVYAWERKRISNCVADYSVLYNSTSFSTFKCYGVSATKLNDLCFSNVYADSFVVKGDDVRQIAPGQTGVIADYNYKLPDDFLGCVLAWNTNSKDSSTSGNYNYLYRWVRRSKLNPYERDLSNDIYSPGGQSCSAVGPNCYNPLRPYGFFTTAGVGHQPYRVVVLSFELLNAPATVCGPKLSTDLIKNQCVNFNFNGLTGTGVLTPSSKRFQPFQQFGRDVSDFTDSVRDPKTSEIL

SEQ ID NO: 62 - protein, 269 aa, Unknown
  Bat SARS-like coronavirus Rs4084 S protein RBD
SNFRVAPSKEVVRFPNITNLCPFGEVFNATTFPSVYAWERKRISNCVADYSILYNSTSFSTFKCYGVSATKLNDLCFSNVYADSFVVKGDDVRQIAPGQTGVIADYNYKLPDDFLGCVLAWNTNSKDSSTSGNYNYLYRWVRRSKLNPYERDLSNDIYSPGGQSCSAVGPNCYNPLRPYGFFTTAGVGHQPYRVVVLSFELLNAPATVCGPKLSTDLIKNQCVNFNFNGLTGTGVLTPSSKRFQPFQQFGRDVSDFTDSVRDPKTSEIL

SEQ ID NO: 63 - protein, 269 aa, Unknown
  Bat SARS coronavirus BtKY72 S protein RBD
SNFRVSPSTEVVRFPNITNLCPFGQVFNASNFPSVYAWERLRISDCVADYAVLYNSSSSFSTFKCYGVSPTKLNDLCFSSVYADYFVVKGDDVRQIAPAQTGVIADYNYKLPDDFTGCVLAWNTNSVDSKSGNNFYYRLFRHGKIKPYERDISNVLYNSAGGTCSSISQLGCYEPLKSYGFTPTVGVGYQPYRVVVLSFELLNAPATVCGPKKSTELVKNKCVNFNFNGLTGTGVLTSSTKKFQPFQQFGRDVSDFTDSVRDPKTFEIL

SEQ ID NO: 64 - protein, 266 aa, Unknown
  SARS-like coronavirus BatCoV/BB9904/BGR/2008 S protein RBD
SNFRVTPTTEVVRFPNITKLCPFDQVFNASSFPSVYAWERVRITDCVANYAVLYNSSVSFSTFQCYGVSPTKLNDLCFSSVYADYFIVKGDDVRQIAPSQTGVIADYNYKLPDDFTGCVIAWNTNALDSNKDFYYRLFRHGKIKPYGRDLSNIPYSPSGTCSTINNLNCFAPLKSYGFTQSSGISFQPYRVVVLSFELLNAPATVCGPKQSTELVKDKCVNFNFNGLTGTGVLTSSSKKFQPFQQFGRDVSDFTDSVRDPKTLEIL

SEQ ID NO: 65 - protein, 266 aa, Unknown
  Bat coronavirus BM48-31/BGR/2008 S protein RBD
SNFRVTPTTEVVRFPNITQLCPFNEVFNITSFPSVYAWERMRITNCVADYSVLYNSSASFSTFQCYGVSPTKLNDLCFSSVYADYFVVKGDDVRQIAPAQTGVIADYNYKLPDDFTGCVIAWNTNSLDSSNEFFYRRFRHGKIKPYGRDLSNVLFNPSGGTCSAEGLNCYKPLASYGFTQSSGIGFQPYRVVVLSFELLNAPATVCGPKQSTELVKNKCVNFNFNGLTGTGVLTNSTKKFQPFQQFGRDVSDFTDSVRDPKTLEIL

SEQ ID NO: 66 - protein, 270 aa, Unknown
  Pangolin coronavirus cDNA8-S S protein RBD
SNFRVQPTESIVRFPNITNLCPFGEVFNATTFASVYAWNRKRISNCVADYSVLYNSTSFSTFKCYGVSPTKLNDLCFTNVYADSFVVRGDEVRQIAPGQTGRIADYNYKLPDDFTGCVIAWNSNNLDSKVGGNYNYLYRLFRKSNLKPFERDISTEIYQAGSTPCNGVEGFNCYFPLQSYGFHPTNGVGYQPYRVVVLSFELLNAPATVCGPKQSTNLVKNKCVNFNFNGLTGTGVLTESSKKFLPFQQFGRDIADTTDAVRDPQTLEIL

SEQ ID NO: 67 - protein, 270 aa, Unknown
  SARS-CoV2 S protein RBD
SNFRVQPTESIVRFPNITNLCPFGEVFNATRFASVYAWNRKRISNCVADYSVLYNSASFSTFKCYGVSPTKLNDLCFTNVYADSFVIRGDEVRQIAPGQTGKIADYNYKLPDDFTGCVIAWNSNNLDSKVGGNYNYLYRLFRKSNLKPFERDISTEIYQAGSTPCNGVEGFNCYFPLQSYGFQPTNGVGYQPYRVVVLSFELLHAPATVCGPKKSTNLVKNKCVNFNFNGLTGTGVLTESNKKFLPFQQFGRDIADTTDAVRDPQTLEIL

SEQ ID NO: 68 - protein, 270 aa, Unknown
  SARS-CoV2 VOC May 01RBD
SNFRVQPTESIVRFPNITNLCPFGEVFNATRFASVYAWNRKRISNCVADYSFLYNSASFSTFKCYGVSLTKLNDLCFTNVYADSFVIRGDEVRQIAPGKTGNIADYNYKLPDDFTGCVIAWNSKKLDSKVGGNYKYRFRLFRKSNLKPFERDISTEIYQAGNKPCNGVKGFNCYSPLQPYGFQPTYGVGYQPYRVVVLSFELLHSPSTVCGPKKSTNLVKNKCVNFNFNGLIGTGVLTESNKNFLPFQQFGRDIDDITDAVRDPQTLDIL

SEQ ID NO: 69 - protein, 270 aa, Unknown
  SARS-CoV2 VOC S protein RBD
SNFRVQPTESIVRFPNITNLCPFGEVFNATRFASVYAWNRKRISNCVADYSFLYNSASFSTFKCYGVSLTKLNDLCFTNVYADSFVIRGDEVRQIAPGQTGNIADYNYKLPDDFTGCVIAWNSKKLDSKVGGNYNYRFRLFRKSNLKPFERDISTEIYQAGNKPCNGVKGFNCYFPLQPYGFQPTYGVGYQPYRVVVLSFELLHSPSTVCGPKKSTNLVKNKCVNFNFNGLTGTGVLTESNKKFLPFQQFGRDIDDITDAVRDPQTLEIL

SEQ ID NO: 70 - protein, 270 aa, Unknown
  Bat coronavirus RaTG13 S protein RBD
SNFRVQPTDSIVRFPNITNLCPFGEVFNATTFASVYAWNRKRISNCVADYSVLYNSTSFSTFKCYGVSPTKLNDLCFTNVYADSFVITGDEVRQIAPGQTGKIADYNYKLPDDFTGCVIAWNSKHIDAKEGGNFNYLYRLFRKANLKPFERDISTEIYQAGSKPCNGQTGLNCYYPLYRYGFYPTDGVGHQPYRVVVLSFELLNAPATVCGPKKSTNLVKNKCVNFNFNGLTGTGVLTESNKKFLPFQQFGRDIADTTDAVRDPQTLEIL

SEQ ID NO: 71 - protein, 268 aa, Unknown
  Pangolin coronavirus GX-P1E S protein RBD
SNFRVQPTISIVRFPNITNLCPFGEVFNASKFASVYAWNRKRISNCVADYSVLYNSTSFSTFKCYGVSPTKLNDLCFTNVYADSFVVKGDEVRQIAPGQTGVIADYNYKLPDDFTGCVIAWNSVKQDALTGGNYLYRLFRKSKLKPFERDISTEIYQAGSTPCNGQVGLNCYYPLERYGFHPTTGVNYQPFRVVVLSFELLNGPATVCGPKLSTTLVKDKCVNFNFNGLTGTGVLTTSKKQFLPFQQFGRDISDTTDAVRDPQTLEIL

SEQ ID NO: 72 - protein, 270 aa, Unknown
  Pangolin coronavirus GX-P2V S protein RBD
  misc_feature (200)..(200): Xaa can be any naturally occurring amino acid
SNFRVQPTISIVRFPNITNLCPFGEVFNASKFASVYAWNRKRISNCVADYSVLYNSTSFSTFKCYGVSPTKLNDLCFTNVYADSFVVKGDEVRQIAPGQTGVIADYNYKLPDDFTGCVIAWNSVKQDALTGGNYGYLYRLFRKSKLKPFERDISTEIYQAGSTPCNGQVGLNCYYPLERYGFHPTTGVNYQPFRVVVLSXELLNGPATVCGPKLSTTLVKDKCVNFNFNGLTGTGVLTTSKKQFLPFQQFGRDISDTTDAVRDPQTLEIL

SEQ ID NO: 73 - protein, 270 aa, Unknown
  Pangolin coronavirus GX-P4L S protein RBD
SNFRVQPTISIVRFPNITNLCPFGEVFNASKFASVYAWNRKRISNCVADYSVLYNSTSFSTFKCYGVSPTKLNDLCFTNVYADSFVVKGDEVRQIAPGQTGVIADYNYKLPDDFTGCVIAWNSVKQDALTGGNYGYLYRLFRKSKLKPFERDISTEIYQAGSTPCNGQVGLNCYYPLERYGFHPTTGVNYQPFRVVVLSFELLNGPATVCGPKLSTTLVKDKCVNFNFNGLTGTGVLTTSKKQFLPFQQFGRDISDTTDAVRDPQTLEIL

SEQ ID NO: 74 - protein, 270 aa, Unknown
  Pangolin coronavirus GX-P5E S protein RBD
SNFRVQPTISIVRFPNITNLCPFGEVFNASKFASVYAWNRKRISNCVADYSVLYNSTSFSTFKCYGVSPTKLNDLCFTNVYADSFVVKGDEVRQIAPGQTGVIADYNYKLPDDFTGCVIAWNSVKQDALTGDNYGYLYRLFRKSKLKPFERDISTEIYQAGSTPCNGQVGLNCYYPLERYGFHPTTGVNYQPFRVVVLSFELLNGPATVCGPKLSTTLVKDKCVNFNFNGLTGTGVLTTSKKQFLPFQQFGRDISDTTDAVRDPQTLEIL

SEQ ID NO: 75 - protein, 261 aa, Unknown
  Bat SARS coronavirus Rc-o319 S protein RBD
SNFRVQPQDTVVRFPNITNLCPFSEVFNATTFASVYAWNRKRISNCVADYSVLYNSTSFSTFQCYGVSSTKLNDLCFTNVYADSFVVRGDEVRQIAPGQTGVIADYNYKLPDDFTGCVLAWNSRNQDASTSGNFNYYYRIWRSEKLRPFERDIAHYDYQVGTQFKSSLKNYGFYSSAGDSHQPYRVVVLSFELLNAPATVCGPKQSTELIKNKCVNFNFNGLTGTGVLTDSNKKFQSFQQFGRDVSDFTDSVKDPKTLEVL

SEQ ID NO: 76 - protein, 265 aa, Unknown
  Bat SARS CoV RShSTT182 S protein RBD
SNFRTSPTTQVVRFPNITNLCPFGEVFNATTFASVYAWNRRRISNCVADYSVLYNTTSFSTFKCYGVSPTKLNDLCFTNVYADSFVVRGDEVRQIAPGQTGKIADYNYKLPDDFMGCVIAWNSISLDAGGSYYYRLFRKSVLKPFERDISTQLYQAGDKPCSVEGPDCYYPLQSYYFQSTNGVGYQPYRVVVLSFELLNAPATVCGPKKSTHLVVNKCVNFNFNGLTGTGVLTSSTKKFLPFQQFGRDVADTTNAVRDPQTLEVL

SEQ ID NO: 77 - protein, 1255 aa, Unknown
  SARS-related coronavirus Spike glycoprotein
MFIFILFLTLTSGSDLDRCTTFDDVQAPNYTQHTSSMRGVYYPDEIFRSDTLYLTQDLFLPFYSNVTGFHTINHTFGNPVIPFKDGIYFAATEKSNVVRGWVFGSTMNNKSQSVIIINNSTNVVIRACNFELCDNPFFAVSKPMGTQTHTMIFDNAFNCTFEYISDAFSLDVSEKSGNFKHLREFVFKNKDGFLYVYKGYQPIDVVRDLPSGFNTLKPIFKLPLGINITNFRAILTAFSPAQDIWGTSAAAYFVGYLKPTTFMLKYDENGTITDAVDCSQNPLAELKCSVKSFEIDKGIYQTSNFRVVPSGDVVRFPNITNLCPFGEVFNATKFPSVYAWERKKISNCVADYSVLYNSTFFSTFKCYGVSATKLNDLCFSNVYADSFVVKGDDVRQIAPGQTGVIADYNYKLPDDFMGCVLAWNTRNIDATSTGNYNYKYRYLRHGKLRPFERDISNVPFSPDGKPCTPPALNCYWPLNDYGFYTTTGIGYQPYRVVVLSFELLNAPATVCGPKLSTDLIKNQCVNFNFNGLTGTGVLTPSSKRFQPFQQFGRDVSDFTDSVRDPKTSEILDISPCSFGGVSVITPGTNASSEVAVLYQDVNCTDVSTAIHADQLTPAWRIYSTGNNVFQTQAGCLIGAEHVDTSYECDIPIGAGICASYHTVSLLRSTSQKSIVAYTMSLGADSSIAYSNNTIAIPTNFSISITTEVMPVSMAKTSVDCNMYICGDSTECANLLLQYGSFCTQLNRALSGIAAEQDRNTREVFAQVKQMYKTPTLKYFGGFNFSQILPDPLKPTKRSFIEDLLFNKVTLADAGFMKQYGECLGDINARDLICAQKFNGLTVLPPLLTDDMIAAYTAALVSGTATAGWTFGAGAALQIPFAMQMAYRFNGIGVTQNVLYENQKQIANQFNKAISQIQESLTTTSTALGKLQDVVNQNAQALNTLVKQLSSNFGAISSVLNDILSRLDKVEAEVQIDRLITGRLQSLQTYVTQQLIRAAEIRASANLAATKMSECVLGQSKRVDFCGKGYHLMSFPQAAPHGVVFLHVTYVPSQERNFTTAPAICHEGKAYFPREGVFVFNGTSWFITQRNFFSPQIITTDNTFVSGNCDVVIGIINNTVYDPLQPELDSFKEELDKYFKNHTSPDVDLGDISGINASVVNIQKEIDRLNEVAKNLNESLIDLQELGKYEQYIKWPWYVWLGFIAGLIAIVMVTILLCCMTSCCSCLKGACSCGSCCKFDEDDSEPVLKGVKLHYT

SEQ ID NO: 78 - protein, 1255 aa, Unknown
  SARS coronavirus wtic-MB Spike glycoprotein precursor
MFIFLLFLTLTSGSDLDRCTTFDDVQAPNYTQHTSSMRGVYYPDEIFRSDTLYLTQDLFLPFYSNVTGFHTINHTFGNPVIPFKDGIYFAATEKSNVVRGWVFGSTMNNKSQSVIIINNSTNVVIRACNFELCDNPFFAVSKPMGTQTHTMIFDNAFNCTFEYISDAFSLDVSEKSGNFKHLREFVFKNKDGFLYVYKGYQPIDVVRDLPSGFNTLKPIFKLPLGINITNFRAILTAFSPAQDIWGTSAAAYFFGYLKPTTFMLKYDENGTITDAVDCSQNPLAELKCSVKSFEIDKGIYQTSNFRVVPSGDVVRFPNITNLCPFGEVFNATKFPSVYAWERKKISNCVADYSVLYNSTFFSTFKCYGVSATKLNDLCFSNVYADSFVVKGDDVRQIAPGQTGVIADYNYKLPDDFMGCVLAWNTRNIDATSTGNYNYKYRYLRHGKLRPFERDISNVPFSPDGKPCTPPALNCYWPLNDYGFYTTTGIGYQPYRVVVLSFELLNAPATVCGPKLSTDLIKNQCVNFNFNGLTGTGVLTPSSKRFQPFQQFGRDVSDFTDSVRDPKTSEILDISPCSFGGVSVITPGTNASSEVAVLYQDVNCTDVSTAIHADQLTPAWRIYSTGNNVFQTQAGCLIGAEHVDTSYECDIPIGAGICASYHTVSLLRSTSQKSIVAYTMSLGADSSIAYSNNTIAIPTNFSISITTEVMPVSMAKTSVDCNMYICGDSTECANLLLQYGSFCTQLNRALSGIAAEQDRNTREVFAQVKQMYKTPTLKYFGGFNFSQILPDPLKPTKRSFIEDLLFNKVTLADAGFMKQYGECLGDINARDLICAQKFNGLTVLPPLLTDDMIAAYTAALVSGTATAGWTFGAGAALQIPFAMQMAYRFNGIGVTQNVLYENQKQIANQFNKAISQIQESLTTTSTALGKLQDVVNQNAQALNTLVKQLSSNFGAISSVLNDILSRLDKVEAEVQIDRLITGRLQSLQTYVTQQLIRAAEIRASANLAATKMSECVLGQSKRVDFCGKGYHLMSFPQAAPHGVVFLHVTYVPSQERNFTTAPAICHEGKAYFPREGVFVFNGTSWFITQRNFFSPQIITTDNTFVSGNCDVVIGIINNTVYDPLQPELDSFKEELDKYFKNHTSPDVDLGDISGINASVVNIQKEIDRLNEVAKNLNESLIDLQELGKYEQYIKWPWYVWLGFIAGLIAIVMVTILLCCMTSCCSCLKGACSCGSCCKFDEDDSEPVLKGVKLHYT

SEQ ID NO: 79 - protein, 1255 aa, Unknown
  SARS coronavirus Shanghai LY Spike glycoprotein
MFIFLLFLTLTSGSDLDRCTTFDDVQAPNYTQHTSSMRGVYYPDEIFRSDTLYLTQDLFLPFYSNVTGFHTINHTFGNPVIPFKDGIYFAATEKSNVVRGWVFGSTMNNKSQSVIIISNSTNVVIRACNFELCDNPFFAVSKPMGTQTHTMIFDNAFNCTFEYISDAFSLDVSEKSGNFKHLREFVFKNKDGSLYVYKGYQPIDVVRDLPSGFNTLKPIFKLPLGINITNFRAILTAFSPAQDIWGTSAAAYFVGYLKPTTFMLKYDENGTITDAVDCSQNPLAELKCSVKSFEIDKGIYQTSNFRVVPSGDVVRFPNITNLCPFGEVFNATKFPSVYAWERKKISNCVADYSVLYNSTFFSTFKCYGVSATKLNDLCFSNVYADSFVVKGDDVRQIAPGQTGVIADYNYKLPDDFMGCVLAWNTGNIDATSTGNYDYKYRYLRHGKLRPFERDISNVPFSPDGKPCTPPALNCYWPLNDYGFYTTTGIGYQPYRVVVLSFELLNAPATVCGPKLSTDLIKNQCVNFNFNGLTGTGVLTPSSKRFQPFQQFGRDVSDFTDSVRDPKTSEILDISPCSFGGVSVITPGTNASSEVAVLYQDVNCTDVSTAIHADQLTPAWRIYSTGNNVFQTQAGCLIGAEHVDTSYECDIPIGAGICASYHTVSLLRSTSQKSIVAYTMSLGADSSIAYSNNTIAIPTNFSISITTEVMPVSMAKTSVDCNMYICGDSTECANLLLQYGSFCTQLNRALSGIAAEQDRNTREVFAQVKQMYKTPTLKYFGGFNFSQILPDPLKPTKRSFIEDLPFNKVTLADAGFMKQYGECLGDINARDLICAQKFNGLTVLPPLLTDDMIAAYTAALVSGTATAGWTFGAGAALQIPFAMQMAYRFNGIGVTQNVLYENQKQIANQFNKAISQIQESLTTTSTALGKLQDVVNQNAQALNTLVKQLSSNFGAISSVLNDILSRLDKVEAEVQIDRLITGRLQSLQTYVTQQLIRAAGIRASANLAATKMSECVLGQSKRVDFCGKGYHLMSFPQAAPHGVVFLHVTYVPSQERNFTTAPAICHEGKAYFPREGVFVFNGTSWFITQRNFFSPQIITTDNTFVSGNCDVVIGIINNTVYDPLQPELDSFKEELDKYFKNHTSPDVDLGDISGINASVVNIQKEIDRLNEVAKNLNESLIDLQELGKYEQYIKWPWYVWLGFIAGLIAIVMVTILLCCMTSCCSCLKGACSCGSCCKFDEDDSEPVLKGVKLHYT

SEQ ID NO: 80 - protein, 1255 aa, Unknown
  SARS coronavirus HKU-39849 Spike glycoprotein precursor
MFIFLLFLTLTSGSDLDRCTTFDDVQAPNYTQHTSSMRGVYYPDEIFRSDTLYLTQDLFLPFYSNVTGFHTINHTFGNPVIPFKDGIYFAATEKSNVVRGWVFGSTMNNKSQSVIIINNSTNVVIRACNFELCDNPFFAVSKPMGTQTHTMIFDNAFNCTFEYISDAFSLDVSEKSGNFKHLREFVFKNKDGFLYVYKGYQPIDVVRDLPSGFNTLKPIFKLPLGINITNFRAILTAFSPAQDIWGTSAAAYFVGYLKPTTFMLKYDENGTITDAVDCSQNPLAELKCSVKSFEIDKGIYQTSNFRVVPSGDVVRFPNITNLCPFGEVFNATKFPSVYAWERKKISNCVADYSVLYNSTFFSTFKCYGVSATKLNDLCFSNVYADSFVVKGDDVRQIAPGQTGVIADYNYKLPDDFMGCVLAWNTRNIDATSTGNYNYKYRYLRHGKLRPFERDISNVPFSPDGKPCTPPALNCYWPLNDYGFYTTTGIGYQPYRVVVLSFELLNAPATVCGPKLSTDLIKNQCVNFNFNGLTGTGVLTPSSKRFQPFQQFGRDVSDFTDSVRDPKTSEILDISPCSFGGVSVITPGTNASSEVAVLYQDVNCTDVSTAIHADQLTPAWRIYSTGNNVFQTQAGCLIGAEHVDTSYECDIPIGAGICASYHTVSLLRSTSQKSIVAYTMSLGADSSIAYSNNTIAIPTNFSISITTEVMPVSMAKTSVDCNMYICGDSTECANLLLQYGSFCTQLNRALSGIAAEQDRNTREVFAQVKQMYKTPTLKYFGGFNFSQILPDPLKPTKRSFIEDLLFNKVTLADAGFMKQYGECLGDINARDLICAQKFNGLTVLPPLLTDDMIAAYTAALVSGIATAGWTFGAGAALQIPFAMQMAYRFNGIGVTQNVLYENQKQIANQFNKAISQIQESLTTTSTALGKLQDVVNQNAQALNTLVKQLSSNFGAISSVLNDILSRLDKVEAEVQIDRLITGRLQSLQTYVTQQLIRAAEIRASANLAATKMSECVLGQSKRVDFCGKGYHLMSFPQAAPHGVVFLHVTYVPSQERNFTTAPAICHEGKAYFPREGVFVFNGTSWFITQRNFFSPQIITTDNTFVSGNCDVVIGIINNTVYDPLQPELDSFKEELDKYFKNHTSPDVDLGDISGINASVVNIQKEIDRLNEVAKNLNESLIDLQELGKYEQYIKWPWYVWLGFIAGLIAIVMVTILLCCMTSCCSCLKGACSCGSCCKFDEDDSEPVLKGVKLHYT

SEQ ID NO: 81 - protein, 1255 aa, Unknown
  SARS-related coronavirus Spike glycoprotein
MLIFLLFLTLTSGSDLDRCTTFDDVQAPNYTQHTSSMRGVYYPDEIFRSDTLYLTQDLFLPFYSNVTGFHTINHTFGNPVIPFKDGIYFAATEKSNVVRGWVFGSTMNNKSQSVIIINNSTNVVIRACNFELCDNPFFAVSKPMGTQTHTMIFDNAFNCTFEYISDAFSLDVSEKSGNFKHLREFVFKNKDGFLYVYKGYQPIDVVRDLPSGFNTLKPIFKLPLGINITNFRAILTAFSPAQDIWGTSAAAYFVGYLKPTTFMLKYDENGTITDAVDCSQNPLAELKCSVKSFEIDKGIYQTSNFRVVPSGDVVRFPNITNLCPFGEVFNATKFPSVYAWERKKISNCVADYSVLYNSTFFSTFKCYGVSATKLNDLCFSNVYADSFVVKGDDVRQIAPGQTGVIADYNYKLPDDFMGCVLAWNTRNIDATSTGNYNYKYRYLRHGKLRPFERDISNVPFSPDGKPCTPPALNCYWPLNDYGFYTTTGIGYQPYRVVVLSFELLNAPATVCGPKLSTDLIKNQCVNFNFNGLTGTGVLTPSSKRFQPFQQFGRDVSDFTDSVRDPKTSEILDISPCSFGGVSVITPGTNASSEVAVLYQDVNCTDVSTAIHADQLTPAWRIYSTGNNVFQTQAGCLIGAEHVDTSYECDIPIGAGICASYHTVSLLRSTSQKSIVAYTMSLGADSSIAYSNNTIAIPTNFSISITTEVMPVSMAKTSVDCNMYICGDSTECANLLLQYGSFCTQLNRALSGIAAEQDRNTREVFAQVKQMYKTPTLKYFGGFNFSQILPDPLKPTKRSFIEDLLFNKVTLADAGFMKQYGECLGDINARDLICAQKFNGLTVLPPLLTDDMIAAYTAALVSGTATAGWTFGAGAALQIPFAMQMAYRFNGIGVTQNVLYENQKQIANQFNKAISQIQESLTTTSTALGKLQDVVNQNAQALNTLVKQLSSNFGAISSVLNDILSRLDKVEAEVQIDRLITGRLQSLQTYVTQQLIRAAEIRASANLAATKMSECVLGQSKRVDFCGKGYHLMSFPQAAPHGVVFLHVTYVPSQERNFTTAPAICHEGKAYFPREGVFVFNGTSWFITQRNFFSPQIITTDNTFVSGNCDVVIGIINNTVYDPLQPELDSFKEELDKYFKNHTSPDVDLGDISGINASVVNIQKEIDRLNEVAKNLNESLIDLQELGKYEQYIKWPWYVWLGFIAGLIAIVMVTILLCCMTSCCSCLKGACSCGSCCKFDEDDSEPVLKGVKLHYT

SEQ ID NO: 82 - protein, 1255 aa, Unknown
  SARS coronavirus Tor2 Spike glycoprotein precursor
  misc_feature (577)..(577): Xaa can be any naturally occurring amino acid
MFIFLLFLTLTSGSDLDRCTTFDDVQAPNYTQHTSSMRGVYYPDEIFRSDTLYLTQDLFLPFYSNVTGFHTINHTFGNPVIPFKDGIYFAATEKSNVVRGWVFGSTMNNKSQSVIIINNSTNVVIRACNFELCDNPFFAVSKPMGTQTHTMIFDNAFNCTFEYISDAFSLDVSEKSGNFKHLREFVFKNKDGFLYVYKGYQPIDVVRDLPSGFNTLKPIFKLPLGINITNFRAILTAFSPAQDIWGTSAAAYFVGYLKPTTFMLKYDENGTITDAVDCSQNPLAELKCSVKSFEIDKGIYQTSNFRVVPSGDVVRFPNITNLCPFGEVFNATKFPSVYAWERKKISNCVADYSVLYNSTFFSTFKCYGVSATKLNDLCFSNVYADSFVVKGDDVRQIAPGQTGVIADYNYKLPDDFMGCVLAWNTRNIDATSTGNYNYKYRYLRHGKLRPFERDISNVPFSPDGKPCTPPALNCYWPLNDYGFYTTTGIGYQPYRVVVLSFELLNAPATVCGPKLSTDLIKNQCVNFNFNGLTGTGVLTPSSKRFQPFQQFGRDVSDFTDSVRDPKTSEILDISPCXFGGVSVITPGTNASSEVAVLYQDVNCTDVSTAIHADQLTPAWRIYSTGNNVFQTQAGCLIGAEHVDTSYECDIPIGAGICASYHTVSLLRSTSQKSIVAYTMSLGADSSIAYSNNTIAIPTNFSISITTEVMPVSMAKTSVDCNMYICGDSTECANLLLQYGSFCTQLNRALSGIAAEQDRNTREVFAQVKQMYKTPTLKYFGGFNFSQILPDPLKPTKRSFIEDLLFNKVTLADAGFMKQYGECLGDINARDLICAQKFNGLTVLPPLLTDDMIAAYTAALVSGTATAGWTFGAGAALQIPFAMQMAYRFNGIGVTQNVLYENQKQIANQFNKAISQIQESLTTTSTALGKLQDVVNQNAQALNTLVKQLSSNFGAISSVLNDILSRLDKVEAEVQIDRLITGRLQSLQTYVTQQLIRAAEIRASANLAATKMSECVLGQSKRVDFCGKGYHLMSFPQAAPHGVVFLHVTYVPSQERNFTTAPAICHEGKAYFPREGVFVFNGTSWFITQRNFFSPQIITTDNTFVSGNCDVVIGIINNTVYDPLQPELDSFKEELDKYFKNHTSPDVDLGDISGINASVVNIQKEIDRLNEVAKNLNESLIDLQELGKYEQYIKWPWYVWLGFIAGLIAIVMVTILLCCMTSCCSCLKGACSCGSCCKFDEDDSEPVLKGVKLHYT

SEQ ID NO: 83 - protein, 1255 aa, Unknown
  SARS coronavirus Tor2 Spike glycoprotein precursor
  misc_feature (444)..(444): Xaa can be any naturally occurring amino acid
  misc_feature (577)..(577): Xaa can be any naturally occurring amino acid
MFIFLLFLTLTSGSDLDRCTTFDDVQAPNYTQHTSSMRGVYYPDEIFRSDTLYLTQDLFLPFYSNVTGFHTINHTFGNPVIPFKDGIYFAATEKSNVVRGWVFGSTMNNKSQSVIIINNSTNVVIRACNFELCDNPFFAVSKPMGTQTHTMIFDNAFNCTFEYISDAFSLDVSEKSGNFKHLREFVFKNKDGFLYVYKGYQPIDVVRDLPSGFNTLKPIFKLPLGINITNFRAILTAFSPAQDIWGTSAAAYFVGYLKPTTFMLKYDENGTITDAVDCSQNPLAELKCSVKSFEIDKGIYQTSNFRVVPSGDVVRFPNITNLCPFGEVFNATKFPSVYAWERKKISNCVADYSVLYNSTFFSTFKCYGVSATKLNDLCFSNVYADSFVVKGDDVRQIAPGQTGVIADYNYKLPDDFMGCVLAWNTRNIDATSTGNYNYKYRYLXHGKLRPFERDISNVPFSPDGKPCTPPALNCYWPLNDYGFYTTTGIGYQPYRVVVLSFELLNAPATVCGPKLSTDLIKNQCVNFNFNGLTGTGVLTPSSKRFQPFQQFGRDVSDFTDSVRDPKTSEILDISPCXFGGVSVITPGTNASSEVAVLYQDVNCTDVSTAIHADQLTPAWRIYSTGNNVFQTQAGCLIGAEHVDTSYECDIPIGAGICASYHTVSLLRSTSQKSIVAYTMSLGADSSIAYSNNTIAIPTNFSISITTEVMPVSMAKTSVDCNMYICGDSTECANLLLQYGSFCTQLNRALSGIAAEQDRNTREVFAQVKQMYKTPTLKYFGGFNFSQILPDPLKPTKRSFIEDLLFNKVTLADAGFMKQYGECLGDINARDLICAQKFNGLTVLPPLLTDDMIAAYTAALVSGTATAGWTFGAGAALQIPFAMQMAYRFNGIGVTQNVLYENQKQIANQFNKAISQIQESLTTTSTALGKLQDVVNQNAQALNTLVKQLSSNFGAISSVLNDILSRLDKVEAEVQIDRLITGRLQSLQTYVTQQLIRAAEIRASANLAATKMSECVLGQSKRVDFCGKGYHLMSFPQAAPHGVVFLHVTYVPSQERNFTTAPAICHEGKAYFPREGVFVFNGTSWFITQRNFFSPQIITTDNTFVSGNCDVVIGIINNTVYDPLQPELDSFKEELDKYFKNHTSPDVDLGDISGINASVVNIQKEIDRLNEVAKNLNESLIDLQELGKYEQYIKWPWYVWLGFIAGLIAIVMVTILLCCMTSCCSCLKGACSCGSCCKFDEDDSEPVLKGVKLHYT

SEQ ID NO: 84 - protein, 1255 aa, Unknown; identical to SEQ ID NO: 30
  SARS coronavirus Tor2 Spike glycoprotein

SEQ ID NO: 85 - protein, 1255 aa, Unknown
  SARS coronavirus ShanghaiQXC1 Spike
MFIFLLFLTLTSGSDLDRCTTFDDVQAPNYTQHTSSMRGVYYPDEIFRSDTLYLTQDLFLPFYSNVTGFHTINHTFGNPVIPFKDGIYFAATEKSNVVRGWVFGSTMNNKSQSVIIINNSTNVVIRACNFELCDNPFFAVSKPMGTQTHTMIFDNAFNCTFEYISDAFSLDVSEKSGNFKHLREFVFKNKDGFLYVYKGYQPIDVVRDLPSGFNTLKPIFKLPLGINITNFRAILTAFSPAQDIWGTSAAAYFVGYLKPTTFMLKYDENGTITDAVDCSQNPLAELKCSVKSFEIDKGIYQTSNFRVVPSGDVVRFPNITNLCPFGEVFNATKFPSVYAWERKKISNCVADYSVLYNSTFFSTFKCYGVSATKLNDLCFSNVYADSFVVKGDDVRQIAPGQTGVIADYNYKLPDDFMGCVLAWNTRNIDATSTGNYNYKYRYLRHGKLRPFERDISNVPFSPDGKPCTPPALNCYWPLNDYGFYTTTGIGYQPYRVVVLSFELLNAPATVCGPKLSTDLIKNQCVNFNFNGLTGTGVLTPSSKRFQPFQQFGRDVSDFTDSVRDPKTSEILDISPCAFGGVSVITPGTNASSEVAVLYQDVNCTNVSAAIHADQLTPAWRIYSTGNNVFQTQAGCLIGAEHVDTSYECDIPIGAGICASYHTVSLLRSTSQKSIVAYTMSLGADSSIAYSNNTIAIPTNFSISITTEVMPVSMAKTSVDCNMYICGDSTECANLLLQYGSFCTQLNRALSGIAAEQDRNTREVFAQVKQMYKTPTLKYFGGFNFSQILPDPLKPTKRSFIEDLLFNKVTLADAGFMKQYGECLGDINARDLICAQKFNGLTVLPPLLTDDMIAAYTAALVSGTATAGWTFGAGAALQIPFAMQMAYRFNGIGVTQNVLYENQKQIANQFNKAISQIQESLTTTSTALGKLQDVVNQNAQALNTLVKQLSSNFGAISSVLNDILSRLDKVEAEVQIDRLITGRLQSLQTYVTQQLIRAAEIRASANLAATKMSECVLGQSKRVDFCGKGYHLMSFPQAAPHGVVFLHVTYVPSQERNFTTAPAICHEGKAYFPREGVFVFNGTSWFITQRNFFSPQIITTDNTFVSGNCDVVIGIINNTVYDPLQPELDSFKGELDKYFKNHTSPDVDLGDISGINASVVNIQKEIDRLNEVAKNLNESLIDLQELGKYEQYIKWPWYVWLGFIAGLIAIVMVTILLCCMTSCCSCLKGACSCGSCCKFDEDDSEPVLKGVKLHYT

SEQ ID NO: 86 - protein, 1255 aa, Unknown
  SARS Coronavirus CDC#200301157 S protein
MFIFLLFLTLTSGSDLDRCTTFDDVQAPNYTQHTSSMRGVYYPDEIFRSDTLYLTQDLFLPFYSNVTGFHTINHTFGNPVIPFKDGIYFAATEKSNVVRGWVFGSTMNNKSQSVIIINNSTNVVIRACNFELCDNPFFAVSKPMGTQTHTMIFDNAFNCTFEYISDAFSLDVSEKSGNFKHLREFVFKNKDGFLYVYKGYQPIDVVRDLPSGFNTLKPIFKLPLGINITNFRAILTAFSPAQDIWGTSAAAYFVGYLKPTTFMLKYDENGTITDAVDCSQNPLAELKCSVKSFEIDKGIYQTSNFRVVPSGDVVRFPNITNLCPFGEVFNATKFPSVYAWERKKISNCVADYSVLYNSTFFSTFKCYGVSATKLNDLCFSNVYADSFVVKGDDVRQIAPGQTGVIADYNYKLPDDFMGCVLAWNTRNIDATSTGNYNYKYRYLRHGKLRPFERDISNVPFSPDGKPCTPPALNCYWPLNDYGFYTTTGIGYQPYRVVVLSFELLNAPATVCGPKLSTDLIKNQCVNFNFNGLTGTGVLTPSSKRFQPFQQFGRDVSDFTDSVRDPKTSEILDISPCSFGGVSVITPGTNASSEVAVLYQDVNCTDVSTAIHADQLTPAWRIYSTGNNVFQTQAGCLIGAEHVDTSYECDIPVGAGICASYHTVSLLRSTSQKSIVAYTMSLGADSSIAYSNNTIAIPTNFSISITTEVMPVSMAKTSVDCNMYICGDSTECANLLLQYGSFCTQLNRALSGIAAEQDRNTREVFAQVKQMYKTPTLKYFGGFNFSQILPDPLKPTKRSFIEDLLFNKVTLADAGFMKQYGECLGDINARDLICAQKFNGLTVLPPLLTDDMIAAYTAALVSGTATAGWTFGAGAALQIPFAMQMAYRFNGIGVTQNVLYENQKQIANQFNKAISQIQESLTTTSTALGKLQDVVNQNAQALNTLVKQLSSNFGAISSVLNDILSRLDKVEAEVQIDRLITGRLQSLQTYVTQQLIRAAEIRASANLAATKMSECVLGQSKRVDFCGKGYHLMSFPQAAPHGVVFLHVTYVPSQERNFTTAPAICHEGKAYFPREGVFVFNGTSWFITQRNFFSPQIITTDNTFVSGNCDVVIGIINNTVYDPLQPELDSFKEELDKYFKNHTSPDVDLGDISGINASVVNIQKEIDRLNEVAKNLNESLIDLQELGKYEQYIKWPWYVWLGFIAGLIAIVMVTILLCCMTSCCSCLKGACSCGSCCKFDEDDSEPVLKGVKLHYT

SEQ ID NO: 87 - protein, 1255 aa, Unknown
  SARS coronavirus P2 Spike glycoprotein precursor
MFIFLLFLTLTSGSDLDRCTTFDDVQAPNYTQHTSSMRGVYYPDEIFRSDTLYLTQDLFLPFYSNVTGFHTINHTFGNPVIPFKDGIYFAATEKSNVVRGWVFGSTMNNKSQSVIIINNSTNVVIRACNFELCDNPFFAVSKPMGTQTHTMIFDNAFNCTFEYISDAFSLDVSEKSGNFKHLREFVFKNKDGFLYVYKGYQPIDVVRDLPSGFNTLKPIFKLPLGINITNFRAILTAFSPAQDIWGTSAAAYFVGYLKPTTFMLKYDENGTITDAVDCSQNPLAELKCSVKSFEIDKGIYQTSNFRVVPSGDVVRFPNITNLCPFGEVFNATKFPSVYAWERKKISNCVADYSVLYNSTFFSTFKCYGVSATKLNDLCFSNVYADSFVVKGDDVRQIAPGQTGVIADYNYKLPDDFMGCVLAWNTRNIDATSTGNYNYKYRYLRHGKLRPFERDISNVPFSPDGKPCTPPALNCYWPLNDYGFYTTTGIGYQPYRVVVLSFELLNAPATVCGPKLSTDLIKNQCVNFNFNGLTGTGVLTPSSKRFQPFQQFGRDVSDFTDSVRDPKTSEILDISPCSFGGVSVITPGTNASSEVAVLYQGVNCTDVSTAIHADQLTPAWRIYSTGNNVFQTQAGCLIGAEHVDTSYECDIPVGAGICASYHTVSLLRSTSQKSIVAYTMSLGADSSIAYSNNTIAIPTNFSISITTEVMPVSMAKTSVDCNMYICGDSTECANLLLQYGSFCTQLNRALSGIAAEQDRNTREVFAQVKQMYKTPTLKYFGGFNFSQILPDPLKPTKRSFIEDLLFNKVTLADAGFMKQYGECLGDINARDLICAQKFNGLTVLPPLLTDDMIAAYTAALVSGTATAGWTFGAGAALQIPFAMQMAYRFNGIGVTQNVLYENQKQIANQFNKAISQIQESLTTTSTALGKLQDVVNQNAQALNTLVKQLSSNFGAISSVLNDILSRLDKVEAEVQIDRLITGRLQSLQTYVTQQLIRAAEIRASANLAATKMSECVLGQSKRVDFCGKGYHLMSFPQAAPHGVVFLHVTYVPSQERNFTTAPAICHEGKAYFPREGVFVFNGTSWFITQRNFFSPQIITTDNTFVSGNCDVVIGIINNTVYDPLQPELDSFKEELDKYFKNHTSPDVDLGDISGINASVVNIQKEIDRLNEVAKNLNESLIDLQELGKYEQYIKWPWYVWLGFIAGLIAIVMVTILLCCMTSCCSCLKGACSCGSCCKFDEDDSEPVLKGVKLHYT

SEQ ID NO: 88 - protein, 1255 aa, Unknown
  SARS coronavirus AS Spike protein S
MFIFLLFLTLTSGSDLDRCTTFDDVQAPNYTQHTSSMRGVYYPDEIFRSDTLYLTQDLFLPFYSNVTGFHTINHTFGNPVIPFKDGIYFAATEKSNVVRGWVFGSTMNNKSQSVIIINNSTNVVIRACNFELCDNPFFAVSKPMGTQTHTMIFDNAFNCTFEYISDAFSLDVSEKSGNFKHLREFVFKNKDGFLYVYKGYQPIDVVRDLPSGFNTLKPIFKLPLGINITNFRAILTAFSPAQDIWGTSAAAYFVGYLKPTTFMLKYDENGTITDAVDCSQNPLAELKCSVKSFEIDKGIYQTSNFRVVPSGDVVRFPNITNLCPFGEVFNATKFPSVYAWERKKISNCVADYSVLYNSTFFSTFKCYGVSATKLNDLCFSNVYADSFVVKGDDVRQIAPGQTGVIADYNYKLPDDFMGCVLAWNTRNIDATSTGNYNYKYRYLRHGKLRPFERDISNVPFSPDGKPCTPPALNCYWPLNDYGFYTTTGIGYQPYRVVVLSFELLNAPATVCGPKLSTDLIKNQCVNFNFNGLTGTGVLTPSSKRFQPFQQFGRDVSDFTDSVRDPKTSEILDISPCSFGGVSVITPGTNASSEVAVLYQDVNCTDVSTAIHADQLTPAWRIYSTGNNVFQTQAGCLIGAEHVDTSYECDIPIGAGICASYHTVSLLRSTSQKSIVAYTMSLGADSSIAYSNNTIAIPTNFSISITTEVMPVSMAKTSVDCNMYICGDSTECANLLLQYGSFCTQLNRALSGIAAEQDRNTREVFAQVKQMYKTPTLKYFGGFNFSQILPDPLKPTKRSFIEDLLFNKVTLADAGFMKQYGECLGDINARDLICAQKFNGLTVLPPLLTDDMIAAYTAALVSGTATAGWTFGAGAALQIPFAMQMAYRFNGIGVTQNVLYENQKQIANQFNKAISQIQESLTTTSTALGKLQDVVNQNAQALNTLVKQLSSNFGAISSVLNDILSRLDKVEAEVQIDRLITGRLQSLQTYVTQQLIRAAEIRASANLAATKMSECVLGQSKRVDFCGKGYHLMSFPQAAPHGVVFLHVTYVPSQERNFTTAPAICHEGKAYFPREGVFVFNGTSWFITQRNFFSPQIITTDNTFVSGNCDVVIGIINNTVYDPLQPELDSFKEELDKYFKNHTSPDVDLGDISGINASVVNIQKEIDRLNEVAKNLNESLIDLQELGKYEQYIKWPWYVWLGFIAGLIAIVMVTILLCCMTSCCSCLKGACSCGSCCKFDEDDSEPVLKGVKLHYT

SEQ ID NO: 89 - protein, 1255 aa, Unknown
  SARS coronavirus ExoN1 Spike glycoprotein precursor
MFIFLLFLTLTSGSDLDRCTTFDDVQAPNYTQHTSSMRGVYYPDEIFRSDTLYLTQDLFLPFYSNVTGFHTINHTFGNPVIPFKDGIYFAATEKSNVVRGWVFGSTMNNKSQSVIIINNSTNVVIRACNFELCDNPFFAVSKPMGTQTHTMIFDNAFNCTFEYISDAFSLDVSEKSGNFKHLREFVFKNKDGFLYVYKGYQPIDVVRDLPSGFNTLKPIFKLPLGINITNFRAILTAFSPAQDIWGTSAAAYFVGYLKPTTFMLKYDENGTITDAVDCSQNPLAELKCSVKSFEIDKGIYQTSNFRVVPSGDVVRFPNITNLCPFGEVFNATKFPSVYAWERKKISNCVADYSVLYNSTFFSTFKCYGVSATKLNDLCFSNVYADSFVVKGDDVRQIAPGQTGVIADYNYKLPDDFMGCVLAWNTRNIDATSTGNYNYKYRYLRHGKLRPFERDISNVPFSPDGKPCTPPALNCYWPLNDYGFYTTTGIGYQPYRVVVLSFELLNAPATVCGPKLSTDLIKNQCVNFNFNGLTGTGVLTPSSKRFQPFQQFGRDVSDFTDSVRDPKTSEILDISPCSFGGVSVITPGTNASSEVAVLYQDVNCTDVSTAIHADQLTPAWRIYSTGNNVFQTQAGCLIGAEYVDTSYECDIPIGAGICASYHTVSLLRSTSQKSIVAYTMSLGADSSIAYSNNTIAIPTNFSISIATEVMPVSMAKTSVDCNMYICGDSTECANLLLQYGSFCTQLNRALSGIAAEQDRNTREVFAQVKQMYKTPTLKYFGGFNFSQILPDPLKPTKRSFIEDLLFNKVTLADAGFMKQYGECLGDINARDLICAQKFNGLTVLPPLLTDDMIAAYTAALVSGTATAGWTFGAGAALQIPFAMQMAYRFNGIGVTQNVLYENQKQIANQFNKAISQIQESLTTTSTALGKLQDVVNQNAQALNTLVKQLSSNFGAISSVLNDILSRLDKVEAEVQIDRLITGRLQSLQTYVTQQLIRAAEIRASANLAATKMSECVLGQSKRVDFCGKGYHLMSFPQAAPHGVVFLHVTYVPSQERNFTTAPAICHEGKAYFPREGVFVFNGTSWFITQRNFFSPQIITTDNTFVSGNCDVVIGIINNTVYDPLQPELDSFKEELDKYFKNHTSPDVDLGDISGINASVVNIQKEIDRLNEVAKNLNESLIDLQELGKYEQYIKWPWYVWLGFIAGLIAIVMVTILLCCMTSCCSCLKGACSCGSCCKFDEDDSEPVLKGVKLHYT

SEQ ID NO: 90 - protein, 1255 aa, Unknown
  SARS coronavirus ExoN1 Spike glycoprotein
MFIFLLFLTLTSGSDLDRCTTFDDVQAPNYTQHTSSMRGVYYPDEIFRSDTLYLTQDLFLPFYSNVTGFHTINHTFGNPVIPFKDGIYFAATEKSNVVRGWVFGSTMNNKSQSVIIINNSTNVVIRACNFELCDNPFFAVSKPMGTQTHTMIFDNAFNCTFEYISDAFSLDVSEKSGNFKHLREFVFKNKDGFLYVYKGYQPIDVVRDLPSGFNTLKPIFKLPLGINITNFRAILTAFSPAQDIWGTSAAAYFVGYLKPTTFMLKYDENGTITDAVDCSQNPLAELKCSVKSFEIDKGIYQTSNFRVVPSGDVVRFPNITNLCPFGEVFNATKFPSVYAWERKKISNCVADYSVLYNSTFFSTFKCYGVSATKLNDLCFSNVYADSFVVKGDDVRQIAPGQTGVIADYNYKLPDDFMGCVLAWNTRNIDATSTGNYNYKYRSLRHGKLRPFERDISNVPFSPDGKPCTPPALNCYWPLNDYGFYTTTGIGYQPYRVVVLSFELLNAPATVCGPKLSTDLIKNQCVNFNFNGLTGTGVLTPSSKRFQPFQQFGRDVSDFTDSVRDPKTSEILDISPCSFGGVSVITPGTNASSEVAVLYQDVNCTDVSTAIHADQLTPAWRIYSTGNNVFQTQAGCLIGAEYVDTSYECDIPIGAGICASYHTVSLLRSTSQKSIVAYTMSLGADSSIAYSNNTIAIPTNFSISIATEVMPVSMAKTSVDCNMYICGDSTECANLLLQYGSFCTQLNRALSGIAAEQDRNTREVFAQVKQMYKTPTLKYFGGFNFSQILPDPLKPTKRSFIEDLLFNKVTLADAGFMKQYGECLGDINARDLICAQKFNGLTVLPPLLTDDMIAAYTAALVSGTVTAGWTFGAGAALQIPFAMQMAYRFNGIGVTQNVLYENQKQIANQFNKAISQIQESLTTTSTALGKLQDVVNQNAQALNTLVKQLSSNFGAISSVLNDILSRLDKVEAEVQIDRLITGRLQSLQTYVTQQLIRAAEIRASANLAATKMSECVLGQSKRVDFCGKGYHLMSFPQAAPHGVVFLHVTYVPSQERNFTTAPAICHEGKAYFPREGVFVFNGTSWFITQRNFFSPQIITTDNTFVSGNCDVVIGIINNTVYDPLQPELDSFKEELDKYFKNHTSPDVDLGDISGINASVVNIQKEIDRLNEVAKNLNESLIDLQELGKYEQYIKWPWYVWLGFIAGLIAIVMVTILLCCMTSCCSCLKGACSCGSCCKFDEDDSEPVLKGVKLHYT

SEQ ID NO: 91 - protein, 1255 aa, Unknown
  SARS coronavirus Frankfurt 1 Spike protein S
MFIFLLFLTLTSGSDLDRCTTFDDVQAPNYTQHTSSMRGVYYPDEIFRSDTLYLTQDLFLPFYSNVTGFHTINHTFGNPVIPFKDGIYFAATEKSNVVRGWVFGSTMNNKSQSVIIINNSTNVVIRACNFELCDNPFFAVSKPMGTQTHTMIFDNAFNCTFEYISDAFSLDVSEKSGNFKHLREFVFKNKDGFLYVYKGYQPIDVVRDLPSGFNTLKPIFKLPLGINITNFRAILTAFSPAQDIWGTSAAAYFVGYLKPTTFMLKYDENGTITDAVDCSQNPLAELKCSVKSFEIDKGIYQTSNFRVVPSGDVVRFPNITNLCPFGEVFNATKFPSVYAWERKKISNCVADYSVLYNSTFFSTFKCYGVSATKLNDLCFSNVYADSFVVKGDDVRQIAPGQTGVIADYNYKLPDDFMGCVLAWNTRNIDATSTGNYNYKYRYLRHGKLRPFERDISNVPFSPDGKPCTPPALNCYWPLNDYGFYTTTGIGYQPYRVVVLSFELLNAPATVCGPKLSTDLIKNQCVNFNFNGLTGTGVLTPSSKRFQPFQQFGRDVSDFTDSVRDPKTSEILDISPCSFGGVSVITPGTNASSEVAVLYQDVNCTDVSTAIHADQLTPAWRIYSTGNNVFQTQAGCLIGAEHVDTSYECDIPIGAGICASYHTVSLLRSTSQKSIVAYTMSLGADSSIAYSNNTIAIPTNFSISITTEVMPVSMAKTSVDCNMYICGDSTECANLLLQYGSFCTQLNRALSGIAAEQDRNTREVFAQVKQMYKTPTLKYFGGFNFSQILPDPLKPTKRSFIEDLLFNKVTLADAGFMKQYGECLGDINARDLICAQKFNGLTVLPPLLTDDMIAAYTAALVSGTATAGWTFGAGAALQIPFAMQMAYRFNGIGVTQNVLYENQKQIANQFNKAISQIQESLTTTSTALGKLQDVVNQNAQALNTLVKQLSSNFGAISSVLNDILSRLDKVEAEVQIDRLITGRLQSLQTYVTQQLIRAAEIRASANLAATKMSECVLGQSKRVDFCGKGYHLMSFPQAAPHGVVFLHVTYVPSQERNFTTAPAICHEGKAYFPREGVFVFNGTSWFITQRNFFSPQIITTDNTFVSGNCDVVIGIINNTVYDPLQPELDSFKEELDKYFKNHTSPDVDFGDISGINASVVNIQKEIDRLNEVAKNLNESLIDLQELGKYEQYIKWPWYVWLGFIAGLIAIVMVTILLCCMTSCCSCLKGACSCGSCCKFDEDDSEPVLKGVKLHYT

SEQ ID NO: 92 - protein, 1255 aa, Unknown
  SARS coronavirus Frankfurt1-v01 Spike glycoprotein
MFIFLLFLTLTSGSDLDRCTTFDDVQAPNYTQHTSSMRGVYYPDEIFRSDTLYLTQDLFLPFYSNVTGFHTINHTFGNPVIPFKDGIYFAATEKSNVVRGWVFGSTMNNKSQSVIIINNSTNVVIRACNFELCDNPFFAVSKPMGTQTHTMIFDNAFNCTFEYISDAFSLDVSEKSGNFKHLREFVFKNKDGFLYVYKGYQPIDVVRDLPSGFNTLKPIFKLPLGINITNFRAILTAFSPAQDIWGTSAAAYFVGYLKPTTFMLKYDENGTITDAVDCSQNPLAELKCSVKSFEIDKGIYQTSNFRVVPSGDVVRFPNITNLCPFGEVFNATKFPSVYAWERKKISNCVADYSVLYNSTFFSTFKCYGVSATKLNDLCFSNVYADSFVVKGDDVRQIAPGQTGVIADYNYKLPDDFMGCVLAWNTRNIDATSTGNYNYKYRYLRHGKLRPFERDISNVPFSPDGKPCTPPALNCYWPLNDYGFYTTTGIGYQPYRVVVLSFELLNAPATVCGPKLSTDLIKNQCVNFNFNGLTGTGVLTPSSKRFQPFQQFGRDVSDFTDSVRDPKTSEILDISPCSFGGVSVITPGTNASSEVAVLYQDVNCTDVSTAIHADQLTPAWRIYSTGNNVFQTQAGCLIGAEYVDTSYECDIPIGAGICASYHTVSLLRSTSQKSIVAYTMSLGADSSIAYSNNTIAIPTNFSISITTEVMPVSMAKTSVDCNMYICGDSTECANLLLQYGSFCTQLNRALSGIAAEQDRNTREVFAQVKQMYKTPTLKYFGGFNFSQILPDPLKPTKRSFIEDLLFNKVTLSDAGFMKQYGECLGDINARDLICAQKFNGLTVLPPLLTDDMIAAYTAALVSGTATAGWTFGAGAALQIPFAMQMAYRFNGIGVTQNVLYENQKQIANQFNKAISQIQESLTTTSTALGKLQDVVNQNAQALNTLVKQLSFNFGAISSVLNDILSRLDKVEAEVQIDRLITGRLQSLQTYVTQQLIRAAEIRASANLAATKMSECVLGQSKRVDFCGKGYHLMSFPQAAPHGVVFLHVTYVPSQERNFTTAPAICHEGKAYFPREGVFVFNGTSWFITQRNFFSPQIITTDNTFVSGNCDVVIGIINNTVYDPLQPELDSFKEELDKYFKNHTSPDVDFGDISGINASVVNIQKEIDRLNEVAKNLNESLIDLQELGKYEQYIKWPWYVWLGFIAGLIAIVMVTILLCCMTSCCSCLKGACSCGSCCKFDEDDSEPVLKGVKLHYT

SEQ ID NO: 93 - protein, 1255 aa, Unknown
  SARS coronavirus Frankfurt 1 Spike protein
MFIFLLFLTLTSGSDLDRCTTFDDVQAPNYTQHTSSMRGVYYPDEIFRSDTLYLTQDLFLPFYSNVTGFHTINHTFGNPVIPFKDGIYFAATEKSNVVRGWVFGSTMNNKSQSVIIINNSTNVVIRACNFELCDNPFFAVSKPMGTQTHTMIFDNAFNCTFEYISDAFSLDVSEKSGNFKHLREFVFKNKDGFLYVYKGYQPIDVVRDLPSGFNTLKPIFKLPLGINITNFRAILTAFSPAQDIWGTSAAAYFVGYLKPTTFMLKYDENGTITDAVDCSQNPLAELKCSVKSFEIDKGIYQTSNFRVVPSGDVVRFPNITNLCPFGEVFNATKFPSVYAWERKKISNCVADYSVLYNSTFFSTFKCYGVSATKLNDLCFSNVYADSFVVKGDDVRQIAPGQTGVIADYNYKLPDDFMGCVLAWNTRNIDATSTGNYNYKYRCLRHGKLRPFERDISNVPFSPDGKPCTPPAFNCYWPLNDYGFYTTTGIGYQPYRVVVLSFELLNAPATVCGPKLSTDLIKNQCVNFNFNGLTGTGVLTPSSKRFQPFQQFGRDVSDFTDSVRDPKTSEILDISPCSFGGVSVITPGTNASSEFAVLYQDVNCTDVSTAIHADQLTPAWRIYSTGNNVFQTQAGCLIGAEYVDTSYECDIPIGAGICASYHTVSLLRSTSQKSIVAYTMSLGADSSIAYSNNTIAIPTNFSISITTEVMPVSMAKTSVDCNMYICGDSTECANLLLQYGSFCTQLNRALSGIAAEQDRNTREVFAQVKQMYKTPTLKYFGGFNFSQILPDPLKSTKRSFIEDLLFNKVTLADAGFMKQYGECLGDINARDLICAQKFNGLTVLPPLLTDDMIAAYTAALVSGTATAGWTFGAGAALQIPFAMQMAYRFNGIGVTQNVLYENQKQIANQFNKAISQIQESLTTTSTALGKLQDVVNQNAQALNTLVKQLSSNFGAISSVLNDILSRLDKVEAEVQIDRLITGRLQSLQTYVTQQLIRAAEIRASANLAATKMSECVLGQSKRVDFCGKGYHLMSFPQAAPHGVVFLHVTYVPSQERNFTTAPAICHEGKAYFPREGVFVFNGTSWFITQRNFFSPQIITTDNTFVSGNCDVVIGIINNTVYDPLQPELDSFKEELDKYFKNHTSPDVDFGDISGINASVVNIQKEIDRLNEVAKNLNESLIDLQELGKYEQYIKWPWYVWLGFIAGLIAIVMVTILLCCMTSCCSCLKGACSCGSCCKFDEDDSEPVLKGVKLHYT

SEQ ID NO: 94 - protein, 1255 aa, Unknown
  SARS-related coronavirus Spike glycoprotein
MFIFLLFLTLTSGSDLDRCTTFDDVQAPNYTQHTSSMRGVYYPDEIFRSDTLYLTQDLFLPFYSNVTGFHTINHTFGNPVIPFKDGIYFAATEKSNVVRGWVFGSTMNNKSQSVIIINNSTNVVIRACNFELCDNPFFAVSKPMGTQTHTMIFDNAFNCTFEYISDAFSLDVSEKSGNFKHLREFVFKNKDGFLYVYKGYQPIDVVRDLPSGFNTLKPIFKLPLGINITNFRAILTAFSPAQDIWGTSAAAYFVGYLKPTTFMLKYDENGTITDAVDCSQNPLAELKCSVKSFEIDKGIYQTSNFRVVPSGDVVRFPNITNLCPFGEVFNATKFPSVYAWERKKISNCVADYSVLYNSTFFSTFKCYGVSATKLNDLCFSNVYVDSFVVKGDDVRQIAPGQTGVIADYNYKLPDDFMGCVLAWNTRNIDATSTGNYNYKYRYLRHGKLRPFERDISNVPFSPDGKPCTPPALNCYWPLNDYGFYTTTGIGYQPYRVVVLSFELLNAPATVCGPKLSTDLIKNQCVNFNFNGLTGTGVLTPSSKRFQPFQQFGRDVSDFTDSVRDPKTSEILDISPCSFGGVSVITPGTNASSEVAVLYQDVNCTDVSTAIHADQLTPAWRIYSTGNNVFQTQAGCLIGAEHVDTSYECDIPIGAGICASYHTVSLLRSTSQKSIVAYTMSLGADSSIAYSNNTIAIPTNFSISITTEVMPVSMAKTSVDCNMYICGDSTECANLLLQYGSFCTQLNRALSGIAAEQDRNTREVFAQVKQMYKTPTLKYFGGFNFSQILPDPLKPTKRSFIEDLLFNKVTLADAGFMKQYGECLGDINARDLICAQKFNGLTVLPPLLTDDMIAAYTAALVSGTATAGWTFGAGAALQIPFAMQMAYRFNGIGVTQNVLYENQKQIANQFNKAISQIQESLTTTSTALGKLQDVVNQNAQALNTLVKQLSSNFGAISSVLNDILSRLDKVEAEVQIDRLITGRLQSLQTYVTQQLIRAAEIRASANLAATKMSECVLGQSKRVDFCGKGYHLMSFPQAAPHGVVFLHVTYVPSQERNFTTAPAICHEGKAYFPREGVFVFNGTSWFITQRNFFSPQIITTDNTFVSGNCDVVIGIINNTVYDPLQPELDSFKEELDKYFKNHTSPDVDLGDISGINASVVNIQKEIDRLNEVAKNLNESLIDLQELGKYEQYIKWPWYVWLGFIAGLIAIVMVTILLCCMTSCCSCLKGACSCGSCCKFDEDDSEPVLKGVKLHYT

SEQ ID NO: 95 - protein, 1255 aa, Unknown
  SARS coronavirus BJ182-12 Spike glycoprotein S
MFIFLLFLTLTSGSDLDRCTTFDDVQAPNYTQHTSSMRGVYYPDEIFRSDTLYLTQDLFLPFYSNVTGFHTINHTFGNPVIPFKDGIYFAATEKSNVVRGWVFGSTMNNKSQSVIIINNSTNVVIRACNFELCDNPFFAVSKPMGTQTHTMIFDNAFNCTFEYISDAFSLDVSEKSGNFKHLREFVFKNKDGFLYVYKGYQPIDVVRDLPSGFNTLKPIFKLPLGINITNFRAILTAFSPAQDIWGTSAAAYFVGYLKPTTFMLKYDENGTITDAVDCSQNPLAELKCSVKSFEIDKGIYQTSNFRVVPSGDVVRFPNITNLCPFGEVFNATKFPSVYAWERKKISNCVADYSVLYNSTFFSTFKCYGVSATKLNDLCFSNVYADSFVVKGDDVRQIAPGQTGVIADYNYKLPDDFMGCVLAWNTRNIDATSTGNYNYKYRYLRHGKLRPFERDISNVPFSPDGKPCTPPALNCYWPLNDYGFYTTTGIGYQPYRVVVLSFELLNAPATVCGPKLSTDLIKNQCVNFNFNGLTGTGVLTPSSKRFQPFQQFGRDVSDFTDSVRDPKTSEILDISPCSFGGVSVITPGTNASSEVAVLYQDVNCTDVSTAIHADQLTPAWRIYSTGNNVFQTQAGCLIGAEHVDTSYECDIPIGAGICASYHTVSLLRSTSQKSIVAYTMSLGADSSIAYSNNTIAIPTNFSISITTEVMPVSMAKTSVDCNMYICGDSTECANLLLQYGSFCTQLNRALSGIAAEQDRNTREVFAQVKQMYKTPTLKYFDGFNFSQILPDPLKPIKRSFIEDLLFNKVTLADAGFMKQYGECLGDINARDLICAQKFNGLTVLPPLLTDDMIAAYTAALVSGTATAGWTFGAGAALQIPFAMQMAYRFNGIGVTQNVLYENQKQIANQFNKAISQIQESLTTTSTALGKLQDVVNQNAQALNTLVKQLSSNFGAISSVLNDILSRLDKVEAEVQIDRLITGRLQSLQTYVTQQLIRAAEIRASANLAATKMSECVLGQSKRVDFCGKGYHLMSFPQAAPHGVVFLHVTYVPSQERNFTTAPAICHEGKAYFPREGVFVFNGTSWFITQRNFFSPQIITTDNTFVSGNCDVVIGIINNTVYDPLQPELDSFKEELDKYFKNHTSPDVDLGDISGINAPVVNIQKEIDRLNEVAKNLNESLIDLRELGKYEQYIKWPWYVWLGFIAGLIAIVMVTILLCCMTSCCSCLKGACSCGSCCKFDEDDSEPVLKGVKLHYT

SEQ ID NO: 96 - protein, 1255 aa, Unknown
  SARS coronavirus BJ182a Spike glycoprotein S
MFIFLLFLTLTSGSDLDRCTTFDDVQAPNYTQHTSSMRGVYYPDEIFRSDTLYLTQDLFLPFYSNVTGFHTINHTFGNPIIPFKDGIYFAATEKSNVVRGWVFGSTMNNKSQSVIIINNSTNVVIRACNFELCDNPFFAVSKPMGTQTHTMIFDNAFNCTFEYISDAFSLDVSEKSGNFKHLREFVFKNKDGFLYVYKGYQPIDVVRDLPSGFNTLKPIFKLPLGINITNFRAILTAFSPAQDIWGTSAAAYFVGYLKPTTFMLKYDENGTITDAVDCSQNPLAELKCSVKSFEIDKGIYQTSNFRVVPSGDVVRFPNITNLCPFGEVFNATKFPSVYAWERKKISNCVADYSVLYNSTFFSTFKCYGVSATKLNDLCFSNVYADSFVVKGDDVRQIAPGQTGVIADYNYKLPDDFMGCVLAWNTRNIDATSTGNYNYKYRYLRHGKLRPFERDISNVPFSPDGKPCTPPALNCYWPLNDYGFYTTTGIGYQPYRVVVLSFELLNAPATVCGPKLSTDLIKNQCVNFNFNGLTGTGVLTPSSKRFQPFQQFGRDVSDFTDSVRDPKTSEILDISPCSFGGVSVITPGTNASSEVAVLYQDVNCTDVSTAIHADQLTPAWRIYSTGNNVFQTQAGCLIGAEHVDTSYECDIPIGAGICASYHTVSLLRSTSQKSIVAYTMSLGADSSIAYSNNTIAIPTNFSISITTEVMPVSMAKTSVDCNMYICGDSTECANLLLQYGSFCTQLNRALSGIAAEQDRNTREVFAQVKQMYKTPTLKYFDGFNFSQILPDPLKPTKRSFIEDLLFNKVTLADAGFMKQYGECLGDINARDLICAQKFNGLTVLPPLLTDDMIAAYTAALVSGTATAGWAFGAGAALQIPFAMQMAYRFNGIGVTQNVLYENQKQIANQFNKAISQIQESLTTTSTALGKLQDVVNQNAQALNTLVKQLSSNFGAISSVLNDILSRLDKVEAEVQIDRLITGRLQSLQTYVTQQLIRAAEIRASANLAATKMSECVLGQSKRVDFCGKGYHLMSFPQAAPHGVVFLHVTYVPSQERNFTTAPAICHEGKAYFPREGVFVFNGTSWFITQRNFFSPQIITTDNTFVSGNCDVVIGIINNTVYDPLQPELDSFKEELDKYFKNHTSPDVDLGDISGINASVVNIQKEIDRLNEVAKNLNESLIDLRELGKYEQYIKWPWYVWLGFIAGLIAIVMVTILLCCMTSCCSCLKGACSCGSCCKFDEDDSEPVLKGVKLHYT

SEQ ID NO: 97 - protein, 1255 aa, Unknown
  SARS coronavirus BJ182-8 Spike glycoprotein S
MFIFLLFLTLTSGSDLDRCTTFDDVQAPNYTQHTSSMRGVYYPDEIFRSDTLYLTQDLFLPFYSNVTGFHTINHTFGNPVIPFKDGIYFAATEKSNVVRGWVFGSTMNNKSQSVIIINNSTNVVIRACNFELCDNPFFAVSKPMGTQTHTMIFDNAFNCTFEYISDAFSLDVSEKSGNFKHLREFVFKNKDGFLYVYKGYQPIDVVRDLPSGFNTLKPIFKLPLGINITNFRAILTAFSPAQDIWGTSAAAYFVGYLKPTTFMLKYDENGTITDAVDCSQNPLAELKCSVKSFEIDKGIYQTSNFRVVPSGDVVRFPNITNLCPFGEVFNATKFPSVYAWERKKISNCVADYSVLYNSTFFSTFKCYGVSATKLNDLCFSNVYADSFVVKGDDVRQIAPGQTGVIADYNYKLPDDFMGCVLAWNTRNIDATSTGNYNYKYRYLRHGKLRPFERDISNVPFSPDGKPCTPPALNCYWPLNDYGFYTTTGIGYQPYRVVVLSFELLNAPATVCGPKLSTDLIKNQCVNFNFNGLTGTGVLTPSSKRFQPFQQFGRDVSDFTDSVRDPKTSEILDISPCSFGGVSVITPGTNASSEVAVLYQDVNCTDVSTAIHADQLTPAWRIYSTGNNVFQTQAGCLIGAEHVDTSYECDIPIGAGICASYHTVSLLRSTSQKSIVAYTMSLGADSSIAYSNNTIAIPTNFSISITTEVMPVSMAKTSVDCNMYICGDSTECANLLLQYGSFCTQLNRALSGIAAEQDRNTREVFAQVKQMYKTPTLKYFDGFNFSQILPDPLKPTKRSFIEDLLFNKVTLADAGFMKQYGECLGDINARDLICAQKFNGLTVLPPLLTDDMIAAYTAALVSGTATAGWTFGAGAALQIPFAMQMAYRFNGIGVTQNVLYENQKQIANQFNKAISQIQESLTTTSTALGKLQDVVNQNAQALNTLVKQLSSNFGAISSVLNDILSRLDKVEAEVQIDRLITGRLQSLQTYVTQQLIRAAEIRASANLAATKMSECVLGQSKRVDFCGKGYHLMSFPQAAPHGVVFLHVTYVPSQERNFTTAPAICHEGKAYFPREGVFVFNGTSWFITQRNFFSPQIITTDNTFVSGNCDVVIGIINNTVYDPLQPELDSFKEELDKYFKNHTSPDVDLGDISGINASVVNIQKEIDRLNEVAKNLNESLIDLRELGKYEQYIKWPWYVWLGFIAGLIAIVMVTILLCCMTSCCSCLKGACSCGSCCKFDEDDSEPVLKGVKLHYT

SEQ ID NO: 98 - protein, 1255 aa, Unknown
  SARS coronavirus BJ182-4 Spike glycoprotein S
MFIFLLFLTLTSGSDLDRCTTFDDVQAPNYTQHTSSMRGVYYPDEIFRSDTLYLTQDLFLPFYSNVTGFHTINHTLGNPVIPFKDGIYFAATEKSNVVRGWVFGSTMNNKSQSVIIINNSTNVVIRACNFELCDNPFFAVSKPMGTQTHTMIFDNAFNCTFEYISDAFSLDVSEKSGNFKHLREFVFKNKDGFLYVYKGYQPIDVVRDLPSGFNTLKPIFKLPLGINITNFRAILTAFSPAQDIWGTSAAAYFVGYLKPTTFMLKYDENGTITDAVDCSQNPLAELKCSVKSFEIDKGIYQTSNFRVVPSGDVVRFPNITNLCPFGEVFNATKFPSVYAWERKKISNCVADYSVLYNSTFFSTFKCYGVSATKLNDLCFSNVYADSFVVKGDDVRQIAPGQTGVIADYNYKLPDDFMGCVLAWNTRNIDATSTGNYNYKYRYLRHGKLRPFERDISNVPFSPDGKPCTPPALNCYWPLNDYGFYTTTGIGYQPYRVVVLSFELLNAPATVCGPKLSTDLIKNQCVNFNFNGLTGTGVLTPSSKRFQPFQQFGRDVSDFTDSVRDPKTSEILDISPCSFGGVSVITPGTNASSEVAVLYQDVNCTDVSTAIHADQLTPAWRIYSTGNNVFQTQAGCLIGAEHVDTSYECDIPIGAGICASYHTVSLLRSTSQKSIVAYTMSLGADSSIAYSNNTIAIPTNFSISITTEVMPVSMAKTSVDCNMYICGDSTECANLLLQYGSFCTQLNRALSGIAAEQDRNTREVFAQVKQMYKTPTLKYFDGFNFSQILPDPLKPTKRSFIEDLLFNKVTLADAGFMKQYGECLGDINARDLICAQKFNGLTVLPPLLTDDMIAAYTAALVSGTATAGWTFGAGAALQIPFAMQMAYRFNGIGVTQNVLYENQKQIANQFNKAISQIQESLTTTSTALGKLQDVVNQNAQALNTLVKQLSSNFGAISSVLNDILSRLDKVEAEVQIDRLITGRLQSLQTYVTQQLIRAAEIRASANLAATKMSECVLGQSKRVDFCGKGYHLMSFPQAAPHGVVFLHVTYVPSQERNFTTAPAICHEGKAYFPREGVFVFNGTSWFITQRNFFSPQIITTDNTFVSGNCDVVIGIINNTVYDPLQPELDSFKEELDKYFKNHTSPDVDLGDISGINASVVNIQKEIDRLNEVAKNLNESLIDLRELGKYEQYIKWPWYVWLGFIAGLIAIVMVTILLCCMTSCCSCLKGACSCGSCCKFDEDDSEPVLKGVKLHYT

SEQ ID NO: 99 - protein, 1255 aa, Unknown
  SARS coronavirus Sino1-11 Spike protein
MFIFLLFLTLTSGSDLDRCTTFDDVQAPNYTQHTSSMRGVYYPDEIFRSDTLYLTQDLFLPFYSNVTGFHTINHTFGNPVIPFKDGIYFAATEKSNVVRGWVFGSTMNNKSQSVIIINNSTNVVIRACNFELCDNPFFAVSKPMGTQTHTMIFDNAFNCTFEYISDAFSLDVSEKSGNFKHLREFVFKNKDGFLYVYKGYQPIDVVRDLPSGFNTLKPIFKLPLGINITNFRAILTAFSPAQDIWGTSAAAYFVGYLKPTTFMLKYDENGTITDAVDCSQNPLAELKCSVKSFEIDKGIYQTSNFRVVPSGDVVRFPNITNLCPFGEVFNATKFPSVYAWERKKISNCVADYSVLYNSTFFSTFKCYGVSATKLNDLCFSNVYADSFVVKGDDVRQIAPGQTGVIADYNYKLPDDFMGCVLAWNTRNIDATSTGNYNYKYRSLRHGKLRPFERDISNVPFSPDGKPCTPPALNCYWPLNDYGFYTTTGIGYQPYRVVVLSFELLNAPATVCGPKLSTDLIKNQCVNFNFNGLTGTGVLTPSSKRFQPFQQFGRDVSDFTDSVRDPKTSEILDISPCSFGGVSVITPGTNASSEVAVLYQDVNCTDVSTAIHADQLTPAWRIYSTGNNVFQTQAGCLIGAEHVDTSYECDIPIGAGICASYHTVSLLRSTSQKSIVAYTMSLGADSSIAYSNNTIAIPTNFSISITTEVMPVSMAKTSVDCNMYICGDSTECANLLLQYGSFCTQLNRALSGIAAEQDRNTREVFAQVKQMYKTPTLKYFGGFNFSQILPDPLKPTKRSFIEDLLFNKVTLADAGFMKQYGECLGDINARDLICAQKFNGLTVLPPLLTDDMIAAYTAALVSGTATAGWTFGAGAALQIPFAMQMAYRFNGIGVTQNVLYENQKQIANQFNKAISQIQESLTTTSTALGKLQDVVNQNAQALNTLVKQLSSNFGAISSVLNDILSRLDKVEAEVQIDRLITGRLQSLQTYVTQQLIRAAEIRASANLAATKMSECVLGQSKRVDFCGKGYHLMSFPQAAPHGVVFLHVTYVPSQERNFTTAPAICHEGKAYFPREGVFVFNGTSWFITQRNFFSPQIITTDNTFVSGNCDVVIGIINNTVYDPLQPELDSFKEELDKYFKNHTSPDVDLGDISGINASVVNIQKEIDRLNEVAKNLNESLIDLQELGKYEQYIKWPWYVWLGFIAGLIAIVMVTILLCCMTSCCSCLKGACSCGSCCKFDEDDSEPVLKGVKLHYT

SEQ ID NO: 100 - protein, 1255 aa, Unknown
  SARS coronavirus ExoN1 Spike glycoprotein precursor
MFIFLLFLTLTSGSDLDRCTTFDDVQAPNYTQHTSSMRGVYYPDEIFRSDTLYLTQDLFLPFYSNVTGFHTINHTFGNPVIPFKDGIYFAATEKSNVVRGWVFGSTMNNKSQSVIIINNSTNVVIRACNFELCDNPFFAVSKPMGTQTHTMIFDNAFNCTFEYISDAFSLDVSEKSGNFKHLREFVFKNKDGFLYVYKGYQPIDVVRDLPSGFNTLKPIFKLPLGINITNFRAILTAFSPAQDIWGTSAAAYFVGYLKPTTFMLKYDENGTITDAVDCSQNPLAELKCSVKSFEIDKGIYQTSNFRVVPSVDVVRFPNITNLCPFGEVFNATKFPSVYAWERKKISNCVADYSVLYNSTFFSTFKCYGVSATKLNDLCFSNVYADSFVVKGDDVRQIAPGQTGVIADYNYKLPDDFMGCVLAWNTRNIDATSTGNYNYKYRYLRHGKLRPFERDISNVPFSPDGKPCTPPALNCYWPLNDYGFYTTTGIGYQPYRVVVLSFELLNAPATVCGPKLSTDLIKNQCVNFNFNGLTGTGVLTPSSKRFQPFQQFGRDVSDFTDSVRDPKTSEILDISPCSFGGVSVITPGTNASSEVAVLYQDVNCTDVSTAIHADQLTPAWRIYSTGNNAFQTQAGCLIGAEHVDTSYECDIPIGAGICASYHTVSLLRSTSQKSIVAYTMSLGADSSIAYSNNTIAIPTNFSISITTEVMPVSMTKTSVDCNMYICGDSTECANLLLQYGSFCTQLNRALSGIAAEQDRNTREVFAQVKQMYKTPTLKYFGGFNFSQILPDPLKPTKRSFIEDLLFNKVTLADAGFMKQYGECLGDINARDLICAQKFNGLTVLPPLLTDDMIAAYTAALVSGTATAGWTFGAGAALQIPFAMQMAYRFNGIGVTQNVLYENQKQIANQFNKAISQIQESLTTTSTALGKLQDVVNQNAQALNTLVKQLSSNFGAISSVLNDILSRLDKVEAEVQIDRLITGRLQSLQTYVTQQLIRAAEIRASANLAATKMSECVLGQSKRVDFCGKGYHLMSFPQAAPHGVVFLHVTYVPSQERNFTTAPAICHEGKAYFPREGVFVFNGTSWFITQRNFFSPQIITTDNTFVSGNCDVVIGIINNTVYDPLQPELDSFKEELDKYFKNHTSPDVDLGDISGINTSVVNIQKEIDRLNEVAKNLNESLIDLQELGKYEQYIKWPWYVWLGFIAGLIAIVMVTILLCCMTSCCSCLKGACSCGSCCKFDEDDSEPVLKGVKLHYT

SEQ ID NO: 101 - protein, 1255 aa, Unknown
  SARS coronavirus ExoN1 Spike glycoprotein precursor
MFIFLLFLTLTSGSDLDRCTTFDDVQAPNYTQHTSSMRGVYYPDEIFRSDTLYLTQDLFLPFYSNVTGFHTINHTFGNPVIPFKDGIYFAATEKSNVVRGWVFGSTMNNKSQSVIIINNSTNVVIRACNFELCDNPFFAVSKPMGTQTHTMIFDNAFNCTFEYISDAFSLDVSEKSGNFKHLREFVFKNKDGFLYVYKGYQPIDVVRDLPSGFNTLKPIFKLPLGINITNFRAILTAFPPAQDIWGTSAAAYFVGYLKPTTFMLKYDENGTITDAVDCSQNPLAELKCSVKSFEIDKGIYQTSNFRVVPSGDVVRFPNITNLCPFGEVFNATKFPSVYAWERKKISNCVADYSVLYNSTFFSTFKCYGVSATKLNDLCFSNVYADSFVVKGDDVRQIAPGQTGVIADYNYKLPDDFMGCVLAWNTRNIDATSTGNYNYKYRYLRHGKLRPFERDISNVPFSPDGKPCTPPALNCYWPLNDYGFYTTTGIGYQPYRVVVLSFELLNAPATVCGPKLSTDLIKNQCVNFNFNGLTGTGVLTPSSKRFQPFQQFGRDVSDFTDSVRDPKTSEILDISPCSFGGVSVITPGTNASSEVAVLYQDVNCTDVSTAIHADQLTPAWRIYSTGNNVFQTQAGCLIGAEHVDTSYECDIPIGAGICASYHTVSLLRSTSQKSIVAYTMSLGADSSIAYSNNTIAIPTNFSISITTEVMPVSMTKTSVDCNMYICGDSTECANLLLQYGSFCTQLNRALSGIAAEQDRNTREVFAQVKQMYKTPTLKYFGGFNFSQILPDPLKPTKRSFIEDLLFNKVTLADAGFMKQYGECLGDINARDLICAQKFNGLTVLPPLLTDDMIAAYTAALVSGTATAGWTFGAGAALQIPFAMQMAYRFNGIGVTQNVLYENQKQIANQFNKAISQIQESLTTTSTALGKLQDVVNQNAQALNTLVKQLSSNFGAISSVLNDILSRLDKVEAEVQIDRLITGRLQSLQTYVTQQLIRAAEIRASANLAATKMSECVLGQSKRVDFCGKGYHLMSFPQAAPHGVVFLHVTYVPSQERNFTTAPAICHEGKAYFPREGVFVFNGTSWFITQRNFFSPQIITTDNTFVSGNCDVVIGIINNTVYDPLQPELDSFKEELDKYFKNHTSPDVDLGDISGINASVVNIQKEIDRLNEVAKNLNESLIDLQELGKYEQYIKWPWYVWLGFIAGLIAIVMVTILLCCMTSCCSCLKGACSCGSCCKFDEDDSEPVLKGVKLHYT

SEQ ID NO: 102 - protein, 1255 aa, Unknown
  SARS coronavirus ExoN1 Spike glycoprotein precursor
  misc_feature (778)..(778): Xaa can be any naturally occurring amino acid
MFIFLLFLTLTSGSDLDRCTTFDDVQAPNYTQHTSSMRGVYYPDEIFRSDTLYLTQDLFLPFYSNVTGFHTINHTFGNPVIPFKDGIYFAATEKSNVVRGWVFGSTMNNKSQSVIIINNSTNVVIRACNFELCDNPFFAVSKPMGTQTHTMIFDNAFNCTFEYISDAFSLDVSEKSGNFKHLREFVFKNKDGFLYVYKGYQPIDVVRDLPSGFNTLKPIFKLPLGINITNFRAILTAFSPAQDIWGTSAAAYFVGYLKPTTFMLKYDENGTITDAVDCSQNPLAELKCSVKSFEIDKGIYQTSNFRVVPSGDVVRFPNITNLCPFGEVFNATKFPSVYAWERKKISNCVADYSVLYNSTFFSTFKCYGVSATKLNDLCFSNVYADSFVVKGDDVRQIAPGQTGVIADYNYKLPDDFMGCVLAWNTRNIDATSTGNYNYKYRYLRHGKLRPFERDISNVPFSPDGKPCTPPALNCYWPLNDYGFYTTTGIGYQPYRVVVLSFELLNAPATVCGPKLSTDLIKNQCVNFNFNGLTGTGVLTPSSKRFQPFQQFGRDVSDFTDSVRDPKTSEILDISPCSFGGVSVITPGTNASSEVAVLYQDVNCTDVSTAIHADQLTPAWRIYSTGNNVFQTQAGCLIGAEHVDTSYECDIPIGAGICASYHTVSLLRSTSQKSIVAYTMSLGADSSIAYSNNTIAIPTNFSISITTEVMPVSMTKTSVDCNMYICGDSTECANLLLQYGSFCTQLNRALSGIAAEQDRNTREVFAQVKQMYKTPTLKXFGGFNFSQILPDPLKPTKRSFIEDLLFNKVTLADAGFMKQYGECLGDINARDLICAQKFNGLTVLPPLLTDDMIAAYTAALVSGTATAGWTFGAGAALQIPFAMQMAYRFNGIGVTQNVLYENQKQIANQFNKAISQIQESLTTTSTALGKLQDVVNQNAQALNTLVKQLSSNFGAISSVLNDILSRLDKVEAEVQIDRLITGRLQSLQTYVTQQLIRAAEIRASANLAATKMSECVLGQSKRVDFCGKGYHLMSFPQAAPHGVVFLHVTYVPSQERNFTTAPAICHEGKAYFPREGVFVFNGTSWFITQRNFFSPQIITTDNTFVSGNCDVVIGIINNTVYDPLQPELDSFKEELDKYFKNHTSPDVDLGDISGINASVVNIQKEIDRLNEIAKNLNESLIDLQELGKYEQYIKWPWYVWLGFIAGLIAIVMVTILLCCMTSCCSCLKGACSCGSCCKFDEDDSEPVLKGVKLHYT

SEQ ID NO: 103 - protein, 1255 aa, Unknown
  SARS coronavirus ExoN1 Spike glycoprotein precursor
MFIFLLFLTLTSGSDLDRCTTFDDVQAPNYTQHTSSMRGVYYPDEIFRSDTLYLTQDLFLPFYSNVTGFHTINHTFGNPVIPFKDGIYFAATEKSNVVRGWVFGSTMNNKSQSVIIINNSTNVVIRACNFELCDNPFFAVSKPMGTQTHTMIFDNAFNCTFEYISDAFSLDVSEKSGNFKHLREFVFKNKDGFLYVYKGYQPIDVVRDLPSGFNTLKPIFKLPLGINITNFRAILTAFSPAQDIWGTSAAAYFVGYLKPTTFMLKYDENGTITDAVDCSQNPLAELKCSVKSFEIDKGIYQTSNFRVVPSGDVVRFPNITNLCPFGEVFNATKFPSVYAWERKKISNCVADYSVLYNSTFFSTFKCYGVSATKLNDLCFSNVYADSFVVKGDDVRQIAPGQTGVIADYNYKLPDDFMGCVLAWNTRNIDATSTGNYNYKYRYLRHGKLRPFERDISNVPFSPDGKPCTPPALNCYWPLNDYGFYTTTGIGYQPYRVVVLSFELLNAPATVCGPKLSTDLIKNQCVNFNFNGLTGTGVLTPSSKRFQPFQQFGRDVSDFTDSVRDPKTSEILDISPCSFGGVSVITPGTNASSEVAVLYQDVNCTDVSTAIHADQLTPAWRIYSTGNNVFQTQAGCLIGAEHVDTSYECDIPIGAGICASYHTVSLLRSTSQKSIVAYTMSLGADSSIAYSNNTIAIPTNFSISITTEVMPVSMTKTSVDCNMYICGDSTECANLLLQYGSFCTQLNRALSGIAAEQDRNTREVFAQVKQMYKTPTLKYFGGFNFSQILPDPLKPTKRSFIEDLLFNKVTLADAGFMKQYGECLGDINARDLICAQKFNGLTVLPPLLTDDMIAAYTAALVSGTATAGWTFGAGAALQIPFAMQMAYRFNGIGVTQNVLYENQKQIANQFNKAISQIQESFTTTSTALGKLQDVVNQNAQALNTLVKQLSSNFGAISSVLNDILSRLDKVEAEVQIDRLITGRLQSLQTYVTQQLIRAAEIRASANLAATKMSECVLGQSKRVDFCGKGYHLMSFPQAAPHGVVFLHVTYVPSQERNFTTAPAICHEGKAYFPREGVFVFNGTSWFITQRNFFSPQIITTDNTFVSGNCDVVIGIINNTVYDPLQPELNSFKEELDKYFKNHTSPDVDLGDISGINASVVNIQKEIDRLNEVAKNLNESLIDLQELGKYEQYIKWPWYVWLGFIAGLIAIVMVTILLCCMTSCCSCLKGACSCGSCCKFDEDDSEPVLKGVKLHYT

SEQ ID NO: 104 - protein, 1255 aa, Unknown
  SARS coronavirus ExoN1 Spike glycoprotein precursor
  misc_feature (163)..(163): Xaa can be any naturally occurring amino acid
MFIFLLFLTLTSGSDLDRCTTFDDVQAPNYTQHTSSMRGVYYPDEIFRSDTLYLTQDLFLPFYSNVTGFHTINHTFGNPVIPFKDGIYFAATEKSNVVRGWVFGSTMNNKSQSVIIINNSTNVVIRACNFELCDNPFFAVSKPMGTQTHTMIFDNAFNCTFEXISDAFSLDVSEKSGNFKHLREFVFKNKDGFLYVYKGYQPIDVVRDLPSGFNTLKPIFKLPLGINITNFRAILTAFSPAQDIWGTSAAAYFVGYLKPTTFMLKYDENGTITDAVDCSQNPLAELKCSVKSFEIDKGIYQTSNFRVVPSGDVVRFPNITNLCPFGEVFNATKFPSVYAWERKKISNCVADYSVLYNSTFFSTFKCYGVSATKLNDLCFSNVYADSFVVKGDDVRQIAPGQTGVIADYNYKLPDDFMGCVLAWNTRNIDATSTGNYNYKYRYLRHGKLRPFERDISNVPFSPDGKPCTPPALNCYWPLNDYGFYTTTGIGYQPYRVVVLSFELLNAPATVCGPKLSTDLIKNQCVNFNFNGLTGTGVLTPSSKRFQPFQQFGRDVSDFTDSVRDPKTSEILDISPCSFGGVSVITPGTNASSEVAVLYQDVNCTDVSTAIHADQLTPAWRIYSTGNNVFQTQAGCLIGAEHVDTSYECDIPIGAGICASYHTVSLLRSTSQKSIVAYTMSLGADSSIAYSNNTIAIPTNFSISITTEVMPVSMTKTSVDCNMYICGDSTECANLLLQYGSFCTQLNRALSGIAAEQDRNTREVFAQVKQMYKTPTLKYFGGFNFSQILPDPLKPTKRSFIEDLLFNKVTLADAGFMKQYGECLGDINARDLICAQKFNGLTVLPPLLTDDMIAAYTAALVSGTATAGWTFGAGAALQIPFAMQMAYRFNGIGVTQNVLYENQKQIANQFNKAISQIQESLTTTSTALGKLQDVVNQNAQALNTLVKQLSSNFGAISSVLNDILSRLDKVEAEVQIDRLITGRLQSLQTYVTQQLIRAAEIRASANLAATKMSECVLGQSKRVDFCGKGYHLMSFPQAAPHGVVFLHVTYVPSQERNFTTAPAICHEGKAYFPREGVFVFNGTSWFITQRNFFSPQIITTDNTFVSGNCDVVIGIINNTVYDPLQPELDSFKEELDKYFKNHTSPDVDLGDISGINASVVNIQKEIDRLNEVAKNLNESLIDLQELGKYEQYIKWPWYVWLGFIAGLIAIVMVTILLCCMTSCCSCLKGACSCGSCCKFDEDDSEPVLKGVKLHYT

SEQ ID NO: 105 - protein, 1255 aa, Unknown
  SARS coronavirus ExoN1 Spike glycoprotein precursor
MFIFLLFLTLTSGSDLDRCTTFDDVQAPNYTQHTSSMRGVYYPDEIFRSDTLYLTQDLFLPFYSNVTGFHTINHTFGNPVIPFKDGIYFAATEKSNVVRGWVFGSTMNNKSQSVIIINNSTNVVIRACNFELCDNPFFAVSKPMGTQTHTMIFDNAFNCTFEYISDAFSLDVSEKSGNFKHLREFVFKNKDGFLYVYKGYQPIDVVRDLPSGFNTLKPIFKLPLGINITNFRAILTAFSPAQDIWGTSAAAYFVGYLKPTTFMLKYDENGTITDAVDCSQNPLAELKCSVKSFEIDKGIYQTSNFRVVPSGDVVRFPNITNLCPFGEVFNATKFPSVYAWERKKISNCVADYSVLYNSTFFSTFKCYGVSATKLNDLCFSNVYADSFVVKGDDVRQIAPGQTGVIADYNYKLPDDFMGCVLAWNTRNIDATSTGNYNYKYRYLRHGKLRPFERDISNVPFSPDGKPCTPPALNCYWPLNDYGFYTTTGIGYQPYRVVVLSFELLNAPATVCGPKLSTDLIKNQCVNFNFNGLTGTGVLTPSSKRFQPFQQFGRDVSDFTDSVRDPKTSEILDISPCSFGGVSVITPGTNASSEVAVLYQDVNCTDVSTAIHADQLTPAWRIYSTGNNVFQTQAGCLIGAEHVDTSYECDIPIGAGICASYHTVSLLRSTSQKSIVVYTMSLGADSSIAYSNNTIAIPTNFSISITTEVMPVSMTKTSVDCNMYICGDSTECANLLLQYGSFCTQLNRALSGIAAEQDRNTREVFAQVKQMYKTPTLKYFGGFNFSQILPDPLKPTKRSFIEDLLFNKVTLADAGFMKQYGECLGDINARDLICAQKFNGLTVLPPLLTDDMIAAYTAALVSGTATAGWTFGAGAALQIPFAMQMAYRFNGIGVTQNVLYENQKQIANQFNKAISQIQESLTTTSTALGKLQDVVNQNAQALNTLVKQLSSNFGAISSVLNDILSRLDKVEAEVQIDRLITGRLQSLQTYVTQQLIRAAEIRASANLAATKMSECVLGQSKRVDFCGKGYHLMSFPQAAPHGVVFLHVTYVPSQERNFTTAPAICHEGKAYFPREGVFVFNGTSWFITQRNFFSPQIITTDNTFVSGNCDVVIGIINNTVYDPLQPELDSFKEELDKYFKNHTSPDVDLGDISGINASVVNIQKEIDRLNEVAKNLNESLIDLQELGKYEQYIKWPWYVWLGFIAGLIAIVMVTILLCCMTSCCSCLKGACSCGSCCKFDEDDSEPVLKGVKLHYT

SEQ ID NO: 106 - protein, 1255 aa, Unknown
  SARS coronavirus ExoN1 Spike glycoprotein precursor
MFIFLLFLTLTSGSDLDRCTTFDDVQAPNYTQHTSSMRGVYYPDEIFRSDTLYLTQDLFLPFYSNVTGFHTINHTFGNPVIPFKDGIYFAATEKSNVVRGWVFGSTMNNKSQSVIIINNSTNVVIRACNFELCDNPFFAVSKPMGTQTHTMIFDNAFNCTFEYISDAFSLDVSEKSGNFKHLREFVFKNKDGFLYVYKGYQPIDVVRDLPSGFNTLKPIFKLPLGINITNFRAILTAFSPAQDIWGTSAAAYFVGYLKPTTFMLKYDENGTITDAVDCSQNPLAELKCSVKSFEIDKGIYQTSNFRVVPSGDVVRFPNITNLCPFGEVFNATKFPSVYAWERKKISNCVADYSVLYNSTFFSTFKCYGVSATKLNDLCFSNVYADSFVVKGDDVRQIAPGQTGVIADYNYKLPDDFMGCVLAWNTRNIDATSTGNYNYKYRYLRHGKLRPFERDISNVPFSPDGKPCTPPALNCYWPLNDYGFYTTTGIGYQPYRVVVLSFELLNAPATVCGPKLSTDLIKNQCVNFNFNGLTGTGVLTPSSKRFQPFQQFGRDVSDFTDSVRDPKTSEILDISPCSFGGVSVITPGTNASSEVAVLYQDVNCTDVSTAIHADQLTPAWRIYSTGNNVFQTQAGCLIGAEHVDTSYECDIPIGAGICASYHTVSLLRSTSQKSIVAYTMSLGADSSIAYSNNTIAIPTNFSISITTEVMPVSMTKTSVDCNMYICGDSTECANLLLQYGSFCTQLNRALSGIAAEQDRNTREVFAQVKQMYKTPTLKYFGGFNFSQILPDPLKPTKRSFIEDLLFNKVTLADAGFMKQYGECLGDINARDLICAQKFNGLTVLPPLLTDDMIAAYTAALVSGTATAGWTFGAGAALQIPFAMQMAYRFNGIGVTQNVLYENQKQIANQFNKAISQIQESLTTTSTALGKLQDVVNQNAQALNTLVKQLSSNFGAISSVLNDILSRLDKVEAEVQIDRLITGRLQSLQTYVTQQLIRAAEIRASANLAATKMSECVLGQSKRVDFCGKGYHLMSFPQAAPHGVVFLHVTYVPSQERNFTTAPAICHEGKAYFPREGVFVFNGTSWFITQRNFFSPQIITTDNTFVSGNCDVVIGIINNTVYDPLQPELDSFKEELDKYFKNHTSPDVDLGDISGINASVVNIQKEIDRLNEVAKNLNESLIDLQELGKYEQYIKWPWYVWLGFIAGLIAIVMVTILLCCMTSCCSCLKGACSCGSCCKFDEDDSEPVLKGVKLHYT

SEQ ID NO: 107 - protein, 1255 aa, Unknown
  SARS coronavirus ExoN1 Spike glycoprotein precursor
MFIFLLFLTLTSGSDLDRCTTFDDVQAPNYTQHTSSMRGVYYPDEIFRSDTLYLTQDLFLPFYSNVTGFHTINHTFGNPVIPFKDGIYFAATEKSNVVRGWVFGSTMNNKSQSVIIINNSTNVVIRACNFELCDNPFFAVSKPMGTQTHTMIFDNAFNCTFEYISDAFSLDVSEKSGNFKHLREFVFKNKDGFLYVYKGYQPIDVVRDLPSGFNTLKPIFKLPLGINITNFRAILTAFSPAQDIWGTSAAAYFVGYLKPTTFMLKYDENGTITDAVDCSQNPLAELKCSVKSFEIDKGIYQTSNFRVVPSGDVVRFPNITNLCPFGEVFNATKFPSVYAWERKKISNCVADYSVLYNSTFFSTFKCYGVSATKLNDLCFSNVYADSFVVKGDDVRQIAPGQTGVIADYNYKLPDDFMGCVLAWNTRNIDATSTGNYNYKYRYLRHGKLRPFERDISNVPFSPDGKPCTPPALNCYWPLNDYGFYTTTGIGYQPYRVVVLSFELLNAPATVCGPKLSTDLIKNQCVNFNFNGLTGTGVLTPSSKRFQPFQQFGRDVSDFTDSVRDPKTSEILDISPCSFGGVSVITPGTNASSEVAVLYQDVNCTDVSTAIHADQLTPAWRIYSTGNNVFQTQAGCLIGAEHVDTSYECDIPIGAGICASYHTVSLLRSTSQKSIVAYTMSLGADSSIAYSNNTIAIPTNFSISITTEVMPVSMTKTSVDCNMYICGDSTECANLLLQYGSFCTQLNRALSGIAAEQDRNTREVFAQVKQMYKTPTLKYFGGFNFSQILPDPLKPTKRSFIEDLLFNKVTLADAGFMKQYGECLGDINARDLICAQKFNGLTVLPPLLTDDMIAAYTAALVSGTATAGWTFGAGAALQIPFAMQMAYRFNGIGVTQNVLYENQKQIANQFNKAISQIQESLTTTSTALGKLQDVVNQNAQALNTLVKQLSSNFGAISSVLNDILSRLDKVEAEVQIDRLITGRLQSLQTYVTQQLIRAAEIRASANLAATKMSECVLGQSKRVDFCGKGYHLMSFPQAAPHGVVFLHVTYVPSQERNFTTAPAICHEGKAYFPREGVFVFNGTSWFITQRNFFSPQIITTDNTFVSGNCDVVIGIINNTVYDPLQPELDSFKEELDKYFKIHTSPDVDLGDISGINASVVNIQKEIDRLNEVAKNLNESLIDLQELGKYEQYIKWPWYVWLGFIAGLIAIVMVTILLCCMTSCCSCLKGACSCGSCCKFDEDDSEPVLKGVKLHYT

SEQ ID NO: 108 - protein, 1255 aa, Unknown
  SARS-related coronavirus Spike glycoprotein
MFIFLLFLTLTSGSDLDRCTTFDDVQAPNYTQHTSSMRGVYYPDEIFRSDTLYLTQDLFLPFYSNVTGFHTINHTFGNPVIPFKDGIYFAATEKSNVVRGWVFGSTMNNKSQSVIIINNSTNVVIRACNFELCDNPFFAVSKPMGTQTHTMIFDNAFNCTFEYISDAFSLDVSEKSGNFKHLREFVFKNKDGFLYVYKGYQPIDVVRDLPSGFNTLKPIFKLPLGINITNFRAILTAFSPAQDIWGTSAAAYFVGYLKPTTFMLKYDENGTITDAVDCSQNPLAELKCSVKSFEIDKGIYQTSNFRVVPSGDVVRFPNITNLCPFGEVFNATKFPSVYAWERKKISNCVADYSVLYNSTFFSTFKCYGVSATKLNDLCFSNVYADSFVVKGDDVRQIAPGQTGVIADYNYKLPDDFMGCVLAWNTRNIDATSTGNYNYKYRYLRHGKLRPFERDISNVPFSPNGKPCTPPALNCYWPLNDYGFYTTTGIGYQPYRVVVLSFELLNAPATVCGPKLSTDLIKNQCVNFNFNGLTGTGVLTPSSKRFQPFQQFGRDVSDFTDSVRDPKTSEILDISPCSFGGVSVITPGTNASSEVAVLYQDVNCTDVSTAIHADQLTPAWRIYSTGNNVFQTQAGCLIGAEHVDTSYECDIPIGAGICASYHTVSLLRSTSQKSIVAYTMSLGADSSIAYSNNTIAIPTNFSISITTEVMPVSMAKTSVDCNMYICGDSTECANLLLQYGSFCTQLNRALSGIAAEQDRNTREVFAQVKQMYKTPTLKYFGGFNFSQILPDPLKPTKRSFIEDLLFNKVTLADAGFMKQYGECLGDINARDLICAQKFNGLTVLPPLLTDDMIAAYTAALVSGTATAGWTFGAGAALQIPFAMQMAYRFNGIGVTQNVLYENQKQIANQFNKAISQIQESLTTTSTALGKLQDVVNQNAQALNTLVKQLSSNFGAISSVLNDILSRLDKVEAEVQIDRLITGRLQSLQTYVTQQLIRAAEIRASANLAATKMSECVLGQSKRVDFCGKGYHLMSFPQAAPHGVVFLHVTYVPSQERNFTTAPAICHEGKAYFPREGVFVFNGTSWFITQRNFFSPQIITTDNTFVSGNCDVVIGIINNTVYDPLQPELDSFKEELDKYFKNHTSPDVDLGDISGINASVVNIQKEIDRLNEVAKNLNESLIDLQELGKYEQYIKWPWYVWLGFIAGLIAIVMVTILLCCMTSCCSCLKGACSCGSCCKFDEDDSEPVLKGVKLHYT

SEQ ID NO: 109 - protein, 1255 aa, Unknown
  SARS coronavirus MA15 ExoN1 Spike glycoprotein precursor
MFIFLLFLTLTSGSDLDRCTTFDDVQAPNYTQHTSSMRGVYYPDEIFRSDTLYLTQDLFLPFYSNVTGFHTINHTFGNPVIPFKDGIYFAATEKSNVVRGWVFGSTMNNKSQSVIIINNSTNVVIRACNFELCDNPFFVVSKPMGTQTHTMIFDNAFNCTFEYISDAFSLDVSEKSGNFKHLREFVFKNKDGFLYVYKGYQPIDVVRDLPSGFNTLKPIFKLPLGINITNFRAILTAFSPAQDIWGTSAAAYFVGYLKPTTFMLKYDENGTITDAVDCSQNPLAELKCSVKSFEIDKGIYQTSNFRVVPSGDVVRFPNITNLCPFGEVFNATKFPSVYAWERKKISNCVADYSVLYNSTFFSTFKCYGVSATKLNDLCFSNVYADSFVVKGDDVRQIAPGQTGVIADYNYKLPDDFMGCVLAWNTRNIDATSTGNHNYKYRYLRHGKLRPFERDISNVPFSPDGKPCTPPALNCYWPLNDYGFYTTTGIGYQPYRVVVLSFELLNAPATVCGPKLSTDLIKNQCVNFNFNGLTGTGVLTPSSKRFQPFQQFGRDVSDFTDSVRDPKTSEILDISPCSFGGVSVITPGTNASSEVAVLYQDVNCTDVSTAIHADQLTPAWRIYSTGNNVFQTQAGCLIGAEHVDTSYECDIPIGAGICASYHTVSLLRSTSQKSIVAYTMSLGADSSIAYSNNTIAIPTNFSISITTEVMPVSMAKTSVDCNMYICGDSTECANLLLQYGSFCTQLNRALSGIAAEQDRNTREVFAQVKQMYKTPTLKYFGGFNFSQMLPDPLKPTKRSFIEDLLFNKVTLADAGFMKQYGECLGDINARDLICAQKFNGLTVLPPLLTDDMIAAYTAALVSGTATAGWTFGAGAALQIPFAMQMAYRFNGIGVTQNVLYENQKQIANQFNKAISQIQESLTTTSTALGKLQDVVNQNAQALNTLVKQLSSNFGAISSVLNDILSRLDKVEAEVQIDRLITGRLQSLQTYVTQQLIRAAEIRASANLAATKMSECVLGQSKRVDFCGKGYHLMSFPQAAPHGVVFLHVTYVPSQERNFTTAPAICHEGKAYFPREGVFVFNGTSWFITQRNFFSPQIITTDNTFVSGNCDVVIGIINNTVYDPLQPELDSFKEELDKYFKNHTSPDVDLGDISGINASVVNIQKEIDRLNEVAKNLNESLIDLQELGKYEQYIKWPWYVWLGFIAGLIAIVMVTILLCCMTSCCSCLKGACSCGSCCKFDEDDSEPVLKGVKLHYT

SEQ ID NO: 110 - protein, 1255 aa, Unknown
  SARS coronavirus MA15 ExoN1 Spike glycoprotein precursor
MFIFLLFLTLTSGSDLDRCTTFDDVQAPNYTQHTSSMRGVYYPDEIFRSDTLYLTQDLFLPFYSNVTGFHTINHTFGNPVIPFKDGIYFAATEKSNVVRGWVFGSTMNNKSQSVIIINNSTNVVIRACNFELCDNPFFAVSKPMGTQTHTMIFDNAFNCTFEYISDAFSLDVSEKSGNFKHLREFVFKNKDGFLYVYKGYQPIDVVRDLPSGFNTLKPIFKLPLGINITNFRAILTAFSPAQDIWGTSAAAYFVGYLKPTTFMLKYDENGTITDAVDCSQNPLAELKCSVKSFEIDKGIYQTSNFRVVPSGDVVRFPNITNLCPFGEVFNATKFPSVYAWERKKISNCVADYSVLYNSTFFSTFKCYGVSATKLNDLCFSNVYADSFVVKGDDVRQIAPGQTGVIADYNYKLPDDFMGCVLAWNTRNIDATSTGNHNYKYRYLRHGKLRPFERDISNVPFSPDGKPCTPPALNCYWPLNDYGFYTTTGIGYQPYRVVVLSFELLNAPATVCGPKLSTDLIKNQCVNFNFNGLTGTGVLTPSSKRFQPFQQFGRDVSDFTDSVRDPKTSEILDISPCSFGGVSVITPGTNASSEVAVLYQDVNCTDVSTAIHADQLTPAWRIYSTGNNVFQTQAGCLIGAEHVDTSYECDIPIGAGICASYHTVSLLRSTSQKSIVAYTMSLGADSSIAYSNNTIAIPTNFSISITTEVMPVSMAKTSVDCNMYICGDSTECANLLLQYGSFCTQLNRALSGIAAEQDRNTREVFAQVKQMYKTPTLKYFGGFNFSQMLPDPLKPTKRSFIEDLLFNKVTLADAGFMKQYGECLGDINARDLICAQKFNGLTVLPPLLTDDMIAAYTAALVSGTATAGWTFGAGAALQIPFAMQMAYRFNGIGVTQNVLYENQKQIANQFNKAISQIQESLTTTSTALGKLQDVVNQNAQALNTLVKQLSSNFGAISSVLNDILSRLDKVEAEVQIDRLITGRLQSLQTYVTQQLIRAAEIRASANLAATKMSECVLGQSKRVDFCGKGYHLMSFPQAAPHGVVFLHVTYVPSQERNFTTAPAICHEGKAYFPREGVFVFNGTSWFITQRNFFSPQIITTDNTFVSGNCDVVIGIINNTVYDPLQPELDSFKEELDKYFKNHTSPDVDLGDISGINASVVNIQKEIDRLNEVAKNLNESLIDLQELGKYEQYIKWPWYVWLGFIAGLIAIVMVTILLCCMTSCCSCLKGACSCGSCCKFDEDDSEPVLKGVKLHYT

SEQ ID NO: 111 - protein, 1255 aa, Unknown
  SARS coronavirus MA15 ExoN1 Spike glycoprotein precursor
  misc_feature (444)..(444): Xaa can be any naturally occurring amino acid
MFIFLLFLTLTSGSDLDRCTTFDDVQAPNYTQHTSSMRGVYYPDEIFRSDTLYLTQDLFLPFYSNVTGFHTINHTFGNPVIPFKDGIYFAATEKSNVVRGWVFGSTMNNKSQSVIIINNSTNVVIRACNFELCDNPFFAVSKPMGTQTHTMIFDNAFNCTFEYISDAFSLDVSEKSGNFKHLREFVFKNKDGFLYVYKGYQPIDVVRDLPSGFNTLKPIFKLPLGINITNFRAILTAFSPAQDIWGTSAAAYFVGYLKPTTFMLKYDENGTITDAVDCSQNPLAELKCSVKSFEIDKGIYQTSNFRVVPSGDVVRFPNITNLCPFGEVFNATKFPSVYAWERKKISNCVADYSVLYNSTFFSTFKCYGVSATKLNDLCFSNVYADSFVVKGDDVRQIAPGQTGVIADYNYKLPDDFMGCVLAWNTRNIDATSTGNHNYKYRYLXHGKLRPFERDISNVPFSPDGKPCTPPALNCYWPLNDYGFYTTTGIGYQPYRVVVLSFELLNAPATVCGPKLSTDLIKNQCVNFNFNGLTGTGVLTPSSKRFQPFQQFGRDVSDFTDSVRDPKTSEILDISPCSFGGVSVITPGTNASSEVAVLYQDVNCTDVSTAIHADQLTPAWRIYSTGNNVFQTQAGCLIGAEHVDTSYECDIPIGAGICASYHTVSLLRSTSQKSIVAYTMSLGADSSIAYSNNTIAIPTNFSISITTEVMPVSMAKTSVDCNMYICGDSTECANLLLQYGSFCTQLNRALSGIAAEQDRNTREVFAQVKQMYKTPTLKYFGGFNFSQILPDPLKPTKRSFIEDLLFNKVTLADAGFMKQYGECLGDINARDLICAQKFNGLTVLPPLLTDDMIAAYTAALVSGTATAGWTFGAGAALQIPFAMQMAYRFNGIGVTQNVLYENQKQIANQFNKAISQIQESLTTTSTALGKLQDVVNQNAQALNTLVKQLSSNFGAISSVLNDILSRLDKVEAEVQIDRLITGRLQSLQTYVTQQLIRAAEIRASANLAATKMSECVLGQSKRVDFCGKGYHLMSFPQAAPHGVVFLHVTYVPSQERNFTTAPAICHEGKAYFPREGVFVFNGTSWFITQRNFFSPQIITTDNTFVSGNCDVVIGIINNTVYDPLQPELDSFKEELDKYFKNHTSPDVDLGDISGINASVVNIQKEIDRLNEVAKNLNESLIDLQELGKYEQYIKWPWYVWLGFIAGLIAIVMVTILLCCMTSCCSCLKGACSCGSCCKFDEDDSEPVLKGVKLHYT

SEQ ID NO: 112 - protein, 1255 aa, Unknown
  SARS coronavirus MA15 Spike glycoprotein precursor
MFIFLLFLTLTSGSDLDRCTTFDDVQAPNYTQHTSSMRGVYYPDEIFRSDTLYLTQDLFLPFYSNVTGFHTINHTFGNPVIPFKDGIYFAATEKSNVVRGWVFGSTMNNKSQSVIIINNSTNVVIRACNFELCDNPFFAVSKPMGTQTHTMIFDNAFNCTFEYISDAFSLDVSEKSGNFKHLREFVFKNKDGFLYVYKGYQPIDVVRDLPSGFNTLKPIFKLPLGINITNFRAILTAFSPAQDIWGTSAAAYFVGYLKPTTFMLKYDENGTITDAVDCSQNPLAELKCSVKSFEIDKGIYQTSNFRVVPSGDVVRFPNITNLCPFGEVFNATKFPSVYAWERKKISNCVADYSVLYNSTFFSTFKCYGVSATKLNDLCFSNVYADSFVVKGDDVRQIAPGQTGVIADYNYKLPDDFMGCVLAWNTRNIDATSTGNHNYKYRYLRHGKLRPFERDISNVPFSPDGKPCTPPALNCYWPLNDYGFYTTTGIGYQPYRVVVLSFELLNAPATVCGPKLSTDLIKNQCVNFNFNGLTGTGVLTPSSKRFQPFQQFGRDVSDFTDSVRDPKTSEILDISPCSFGGVSVITPGTNASSEVAVLYQDVNCTDVSTAIHADQLTPAWRIYSTGNNVFQTQAGCLIGAEHVDTSYECDIPIGAGICASYHTVSLLRSTSQKSIVAYTMSLGADSSIAYSNNTIAIPTNFSISITTEVMPVSMAKTSVDCNMYICGDSTECANLLLQYGSFCTQLNRALSGIAAEQDRNTREVFAQVKQMYKTPTLKYFGGFNFSQILPDPLKPTKRSFIEDLLFNKVTLADAGFMKQYGECLGDINARDLICAQKFNGLTVLPPLLTDDMIAAYTAALVSGTATAGWTFGAGAALQIPFAMQMAYRFNGIGVTQNVLYENQKQIANQFNKAISQIQESLTTTSTALGKLQDVVNQNAQALNTLVKQLSSNFGAISSVLNDILSRLDKVEAEVQIDRLITGRLQSLQTYVTQQLIRAAEIRASANLAATKMSECVLGQSKRVDFCGKGYHLMSFPQAAPHGVVFLHVTYVPSQERNFTTAPAICHEGKAYFPREGVFVFNGTSWFITQRNFFSPQIITTDNTFVSGNCDVVIGIINNTVYDPLQPELDSFKEELDKYFKNHTSPDVDLGDISGINASVVNIQKEIDRLNEVAKNLNESLIDLQELGKYEQYIKWPWYVWLGFIAGLIAIVMVTILLCCMTSCCSCLKGACSCGSCCKFDEDDSEPVLKGVKLHYT

SEQ ID NO: 113 - protein, 1255 aa, Unknown
  SARS coronavirus MA15 ExoN1 Spike glycoprotein precursor
  misc_feature (716)..(716): Xaa can be any naturally occurring amino acid
MFIFLLFLTLTSGSDLDRCTTFDDVQAPNYTQHTSSMRGVYYPDEIFRSDTLYLTQDLFLPFYSNVTGFHTINHTFGNPVIPFKDGIYFAATEKSNVVRGWVFGSTMNNKSQSVIIINNSTNVVIRACNFELCDNPFFAVSKPMGTQTHTMIFDNAFNCTFEYISDAFSLDVSEKSGNFKHLREFVFKNKDGFLYVYKGYQPIDVVRDLPSGFNTLKPIFKLPLGINITNFRAILTAFSPAQDIWGTSAAAYFVGYLKPTTFMLKYDENGTITDAVDCSQNPLAELKCSVKSFEIDKGIYQTSNFRVVPSGDVVRFPNITNLCPFGEVFNATKFPSVYAWERKKISNCVADYSVLYNSTFFSTFKCYGVSATKLNDLCFSNVYADSFVVKGDDVRQIAPGQTGVIADYNYKLPDDFMGCVLAWNTRNIDATSTGNHNYKYRYLRHGKLRPFERDISNVPFSPDGKPCTPPALNCYWPLNDYGFYTTTGIGYQPYRVVVLSFELLNAPATVCGPKLSTDLIKNQCVNFNFNGLTGTGVLTPSSKRFQPFQQFGRDVSDFTDSVRDPKTSEILDISPCSFGGVSVITPGTNASSEVAVLYQDVNCTDVSTAIHADQLTPAWRIYSTGNNVFQTQAGCLIGAEHVDTSYECDIPIGAGICASYHTVSLLRSTSQKSIVAYTMSLGADSSIAYSNNTIAIPTNFSISITTEVMPVSMAKXSVDCNMYICGDSTECANLLLQYGSFCTQLNRALSGIAAEQDRNTREVFAQVKQMYKTPTLKYFGGFNFSQILPDPLKPTKRSFIEDLLFNKVTLADAGFMKQYGECLGDINARDLICAQKFNGLTVLPPLLTDDMIAAYTAALVSGTATAGWTFGAGAALQIPFAMQMAYRFNGIGVTQNVLYENQKQIANQFNKAISQIQESLTTTSTALGKLQDVVNQNAQALNTLVKQLSSNFGAISSVLNDILSRLDKVEAEVQIDRLITGRLQSLQTYVTQQLIRAAEIRASANLAATKMSECVLGQSKRVDFCGKGYHLMSFPQAAPHGVVFLHVTYVPSQERNFTTAPAICHEGKAYFPREGVFVFNGTSWFITQRNFFSPQIITTDNTFVSGNCDVVIGIINNTVYDPLQPELDSFKEELDKYFKNHTSPDVDLGDISGINASVVNIQKEIDRLNEVAKNLNESLIDLQELGKYEQYIKWPWYVWLGFIAGLIAIVMVTILLCCMTSCCSCLKGACSCGSCCKFDEDDSEPVLKGVKLHYT

SEQ ID NO: 114 - protein, 1255 aa, Unknown
  SARS-related coronavirus Spike glycoprotein
MFIFLLFLTLTSGSDLDRCTTFDDVQAPNYTQHTSSMRGVYYPDEIFRSDTLYLTQDLFLPFYSNVTGFHTINHTFGNPVIPFKDGIYFAATEKSNVVRGWVFGSTMNNKSQSVIIINNSTNVVIRACNFELCDNPFIAVSKPMGTQTHTMIFDNAFNCTFEYISDAFSLDVSEKSGNFKHLREFVFKNKDGFLYVYKGYQPIDVVRDLPSGFNTLKPIFKLPLGINITNFRAILTAFSPAQDIWGTSAAAYFVGYLKPTTFMLKYDENGTITDAVDCSQNPLAELKCSVKSFEIDKGIYQTSNFRVVPSGDVVRFPNITNLCPFGEVFNATKFPSVYAWERKKISNCVADYSVLYNSTFFSTFKCYGVSATKLNDLCFSNVYADSFVVKGDDVRQIAPGQTGVIADYNYKLPDDFMGCVLAWNTRNIDATSTGNYNYKYRYLRHGKLRPFERDISNVPFSPDGKPCTPPALNCYWPLNDYGFYTTTGIGYQPYRVVVLSFELLNAPATVCGPKLSTDLIKNQCVNFNFNGLTGTGVLTPSSKRFQPFQQFGRDVSDFTDSVRDPKTSEILDISPCSFGGVSVITPGTNASSEVAVLYQDVNCTDVSTAIHADQLTPAWRIYSTGNNVFQTQAGCLIGAEHVDTSYECDIPIGAGICASYHTVSLLRSTSQKSIVAYTMSLGADSSIAYSNNTIAIPTNFSISITTEVMPVSMAKTSVDCNMYICGDSTECANLLLQYGSFCTQLNRALSGIAAEQDRNTREVFAQVKQMYKTPTLKYFGGFNFSQILPDPLKPTKRSFIEDLLFNKVTLADAGFMKQYGECLGDINARDLICAQKFNGLTVLPPLLTDDMIAAYTAALVSGTATAGWTFGAGAALQIPFAMQMAYRFNGIGVTQNVLYENQKQIANQFNKAISQIQESLTTTSTALGKLQDVVNQNAQALNTLVKQLSSNFGAISSVLNDILSRLDKVEAEVQIDRLITGRLQSLQTYVTQQLIRAAEIRASANLAATKMSECVLGQSKRVDFCGKGYHLMSFPQAAPHGVVFLHVTYVPSQERNFTTAPAICHEGKAYFPREGVFVFNGTSWFITQRNFFSPQIITTDNTFVSGNCDVVIGIINNTVYDPLQPELDSFKEELDKYFKNHTSPDVDLGDISGINASVVNIQKEIDRLNEVAKNLNESLIDLQELGKYEQYIKWPWYVWLGFIAGLIVIVMVTILLCCMTSCCSCLKGACSCGSCCKFDEDDSEPVLKGVKLHYT

SEQ ID NO: 115 - protein, 1255 aa, Unknown
  SARS-related coronavirus Spike glycoprotein (GenBank: ABD72970)SARS-related coronavirus Spike glycoprotein
MFIFLLFLTLTSGSDLDRCTTFDDVQAPNYTQHTSSMRGVYYPDEIFRSDTLYLTQDLFLPFYSNVTGFHTINHTFGNPVIPFKDGIYFAATEKSNVVRGWVFGSTMNNKSQSVIIINNSTNVVIRACNFELCDNPFFAVSKPMGTQTHTMIFDNAFNCTFEYISDAFSLDVSEKSGNFKHLREFVFKNKDGFLYVYKGYQPIDVVRDLPSGFNTLKPIFKLPLGINITNFRAILTAFSPAQDIWGTSAAAYFVGYLKPTTFMLKYDENGTITDAVDCSQNPLAELKCSVKSFEIDKGIYQTSNFRVVPSGDVVRFPNITNLCPFGEVFNATKFPSVYAWERKKISNCVADYSVLYNSTFFSTFKCYGVSATKLNDLCFSNVYADSFVVKGDDVRQIAPGQTGVIADYNYKLPDDFMGCVLAWNTRNIDATSTGNYNYKYRYLRHGKLRPFERDISNVPFSPDGKPCTPPALNCYWPLNDYGFYTTTGIGYQPYRVVVLSFELLNAPATVCGPKLSTDLIKNQCVNFNFNGLTGTGVLTPSSKRFQPFQQFGRDVSDFTDSVRDPKTSEILDISPCSFGGVSVITPGTNASSEVAVLYQDVNCTDVSTAIHADQLTPAWRIYSTGNNVFQTQAGCLIGAEHVDTSYECDIPIGAGICASYHTVSLLRSTSQKSIVAYTMSLGADSSIAYSNNTIAIPTNFSISITTEVMPVSMAKTSVDCNMYICGDSTECANLLLQYGSFCTQLNRALSGIAAEQDRNTREVFAQVKQMYKTPTLKYFGGFNFSQILPDPLKPTKRSFIEDLLFNKVTLADAGFMKQYGECLGDINARDLICAQKFNGLTVLPPLLTDDMIAAYTAALVSGTATAGWTFGAGAALQIPFAMQMAYRFNGIGVTQNVLYENQKQIANQFNKAISQIQESLTTTSTALGKLQDVVNQNAQALNTLVKQLSSNFGAISSVLNDILSRLDKVEAEVQIDRLITGRLQSLQTYVTQQLIRAAEIRASANLAATKMSECVLGQSKRVDFCGKGYHLMSFPQAAPHGVVFLHVTYVPSQERNFTTAPAICHEGKAYFPREGVFVFNGTSWFITQRNFFSPQIITTDNTFVSGNCDVVIGIINNTVYDPLQPELDSFKEELDKYFKNHTSPDVDLGDISGINASVVNIQKEIDRLNEVAKNLNESLIDLQELGKYEQYIKWPWYVWLGFIAGLIVIVMVTILLCCMTSCCSCLKGACSCGSCCKFDEDDSEPVLKGVKLHYT

SEQ ID NO: 116 - protein, 1255 aa, Unknown
  SARS-related coronavirus Spike glycoprotein
MFIFLLFLTLTNGSDLDRCTTFDDVQAPNYTQHTSSMRGVYYPDEIFRSDTLYLTQDLFLPFYSNVTGFHTINHTFGNPVIPFKDGIYFAATEKSNVVRGWVFGSTMNNKSQSVIIINNSTNVVIRACNFELCDNPFFAVSKPMGTQTHTMIFDNAFNCTFEYISDAFSLDVSEKSGNFKHLREFVFKNKDGFLYVYKGYQPIDVVRDLPSGFNTLKPIFKLPLGINITNFRAILTAFSPAQDIWGTSAAAYFVGYLKPTTFMLKYDENGTITDAVDCSQNPLAELKCSVKSFEIDKGIYQTSNFRVVPSGDVVRFPNITNLCPFGEVFNATKFPSVYAWERKKISNCVADYSVLYNSTFFSTFKCYGVSATKLNDLCFSNVYADSFVVKGDDVRQIAPGQTGVIADYNYKLPDDFMGCVLAWNTRNIDATSTGNYNYKYRYLRHGKLRPFERDISNVPFSPDGKPCTPPALNCYWPLNDYGFYTTTGIGYQPYRVVVLSFELLNAPATVCGPKLSTDLIKNQCVNFNFNGLTGTGVLTPSSKRFQPFQQFGRDVSDFTDSVRDPKTSEILDISPCSFGGVSVITPGTNASSEVAVLYQDVNCTDVSTAIHADQLTPAWRIYSTGNNVFQTQAGCLIGAEHVDTSYECDIPIGAGICASYHTVSLLRSTSQKSIVAYTMSLGADSSIAYSNNTIAIPTNFSISITTEVMPVSMAKTSVDCNMYICGDSTECANLLLQYGSFCTQLNRALSGIAAEQDRNTREVFAQVKQMYKTPTLKYFGGFNFSQILPDPLKPTKRSFIEDLLFNKVTLADAGFMKQYGECLGDINARDLICAQKFNGLTVLPPLLTDDMIAAYTAALVSGTATAGWTFGAGAALQIPFAMQMAYRFNGIGVTQNVLYENQKQIANQFNKAISQIQESLTTTSTALGKLQDVVNQNAQALNTLVKQLSSNFGAISSVLNDILSRLDKVEAEVQIDRLITGRLQSLQTYVTQQLIRAAEIRASANLAATKMSECVLGQSKRVDFCGKGYHLMSFPQAAPHGVVFLHVTYVPSQERNFTTAPAICHEGKAYFPREGVFVFNGTSWFITQRNFFSPQIITTDNTFVSGNCDVVIGIINNTVYDPLQPELDSFKEELDKYFKNHTSPDVDLGDISGINASVVNIQKEIDRLNEVAKNLNESLIDLQELGKYEQYIKWPWYVWLGFIAGLIVIVMVTILLCCMTSCCSCLKGACSCGSCCKFDEDDSEPVLKGVKLHYT

SEQ ID NO: 117 - protein, 1255 aa, Unknown
  SARS-related coronavirus Spike glycoprotein
MFIFLLFLTLTSGSDLDRCTTFDDVQAPNYTQHTSSMRGVYYPDEIFRSDTLYLTQDLFLPFYSNVTGFHTINHTFGNPVIPFKDGIYFAATEKSNVVRGWVFGSTMNNKSQSVIIINNSTNVVIRACNFELCDNPFIAVSKPMGTQTHTMIFDNAFNCTFEYISDAFSLDVSEKSGNFKHLREFVFKNKDGFLYVYKGYQPIDVVRDLPSGFNTLKPIFKLPLGINITNFRAILTAFSPAQDIWGTSAAAYFVGYLKPTTFMLKYDENGTITDAVDCSQNPLAELKCSVKSFEIDKGIYQTSNFRVVPSGDVVRFPNITNLCPFGEVFNATKFPSVYAWERKKISNCVADYSVLYNSTFFSTFKCYGVSATKLNDLCFSNVYADSFVVKGDDVRQIAPGQTGVIADYNYKLPDDFMGCVLAWNTRNIDATSTGNYNYKYRYLRHGKLRPFERDISNVPFSPDGKPCTPPALNCYWPLNDYGFYTTTGIGYQPYRVVVLSFELLNAPATVCGPKLSTDLIKNQCVNFNFNGLTGTGVLTPSSKRFQPFQQFGRDVSDFTDSVRDPKTSEILDISPCSFGGVSVITPGTNASSEVAVLYQDVNCTDVSTAIHADQLTPAWRIYSTGNNVFQTQAGCLIGAEHVDTSYECDIPIGAGICASYHTVSLLRSTSQKSIVAYTMSLGADSSIAYSNNTIAIPTNFSISITTEVMPVSMAKTSVDCNMYICGDSTECANLLLQYGSFCTQLNRALSGIAAEQDRNTREVFAQVKQMYKTPTLKYFGGFNFSQILPDPLKPTKRSFIEDLLFNKVTLADAGFMKQYGECLGDINARDLICAQKFNGLTVLPPLLTDDMIAAYTAALVSGTATAGWTFGAGAALQIPFAMQMAYRFNGIGVTQNVLYENQKQIANQFNKAISQIQESLTTTSTALGKLQDVVNQNAQALNTLVKQLSSNFGAISSVLNDILSRLDKVEAEVQIDRLITGRLQSLQTYVTQQLIRAAEIRASANLAATKMSECVLGQSKRVDFCGKGYHLMSFPQAAPHGVVFLHVTYVPSQERNFTTAPAICHEGKAYFPREGVFVFNGTSWFITQRNFFSPQIITTDNTFVSGNCDVVIGIINNTVYDPLQPELDSFKEELDKYFKNHTSPDVDLGDISGINASVVNIQKEIDRLNEVAKNLNESLIDLQELGKYEQYIKWPWYVWLGFIAGLIAIVMVTILLCCMTSCCSCLKGACSCGSCCKFDEDDSEPVLKGVKLHYT

SEQ ID NO: 118 - protein, 1255 aa, Unknown
  SARS-related coronavirus Spike glycoprotein
MFIFLLFLTLTRGSDLDRCTTFDDVQAPNYTQHTSSMRGVYYPDEIFRSDTLYLTQDLFLPFYSNVTGFHTINHTFGNPVIPFKDGIYFAATEKSNVVRGWVFGSTMNNKSQSVIIINNSTNVVIRACNFELCDNPFIAVSKPMGTQTHTMIFDNAFNCTFEYISDAFSLDVSEKSGNFKHLREFVFKNKDGFLYVYKGYQPIDVVRDLPSGFNTLKPIFKLPLGINITNFRAILTAFSPAQDIWGTSAAAYFVGYLKPTTFMLKYDENGTITDAVDCSQNPLAELKCSVKSFEIDKGIYQTSNFRVVPSGDVVRFPNITNLCPFGEVFNATKFPSVYAWERKKISNCVADYSVLYNSTFFSTFKCYGVSATKLNDLCFSNVYADSFVVKGDDVRQIAPGQTGVIADYNYKLPDDFMGCVLAWNTRNIDATSTGNYNYKYRYLRHGKLRPFERDISNVPFSPDGKPCTPPALNCYWPLNDYGFYTTTGIGYQPYRVVVLSFELLNAPATVCGPKLSTDLIKNQCVNFNFNGLTGTGVLTPSSKRFQPFQQFGRDVSDFTDSVRDPKTSEILDISPCSFGGVSVITPGTNASSEVAVLYQDVNCTDVSTAIHADQLTPAWRIYSTGNNVFQTQAGCLIGAEHVDTSYECDIPIGAGICASYHTVSLLRSTSQKSIVAYTMSLGADSSIAYSNNTIAIPTNFSISITTEVMPVSMAKTSVDCNMYICGDSTECANLLLQYGSFCTQLNRALSGIAAEQDRNTREVFAQVKQMYKTPTLKYFGGFNFSQILPDPLKPTKRSFIEDLLFNKVTLADAGFMKQYGECLGDINARDLICAQKFNGLTVLPPLLTDDMIAAYTAALVSGTATAGWTFGAGAALQIPFAMQMAYRFNGIGVTQNVLYENQKQIANQFNKAISQIQESLTTTSTALGKLQDVVNQNAQALNTLVKQLSSNFGAISSVLNDILSRLDKVEAEVQIDRLITGRLQSLQTYVTQQLIRAAEIRASANLAATKMSECVLGQSKRVDFCGKGYHLMSFPQAAPHGVVFLHVTYVPSQERNFTTAPAICHEGKAYFPREGVFVFNGTSWFITQRNFFSPQIITTDNTFVSGNCDVVIGIINNTVYDPLQPELDSFKEELDKYFKNHTSPDVDLGDISGINASVVNIQKEIDRLNEVAKNLNESLIDLQELGKYEQYIKWPWYVWLGFIAGLIAIVMVTILLCCMTSCCSCLKGACSCGSCCKFDEDDSEPVLKGVKLHYT

SEQ ID NO: 119 - protein, 1255 aa, Unknown
  SARS-related coronavirus Spike glycoprotein
MFIFLLFLTLTRGSDLDRCTTFDDVQAPNYTQHTSSMRGVYYPDEIFRSDTLYLTQDLFLPFYSNVTGFHTINHTFGNPVIPFKDGIYFAATEKSNVVRGWVFGSTMNNKSQSVIIINNSTNVVIRACNFELCDNPFFAVSKPMGTQTHTMIFDNAFNCTFEYISDAFSLDVSEKSGNFKHLREFVFKNKDGFLYVYKGYQPIDVVRDLPSGFNTLKPIFKLPLGINITNFRAILTAFSPAQDIWGTSAAAYFVGYLKPTTFMLKYDENGTITDAVDCSQNPLAELKCSVKSFEIDKGIYQTSNFRVVPSGDVVRFPNITNLCPFGEVFNATKFPSVYAWERKKISNCVADYSVLYNSTFFSTFKCYGVSATKLNDLCFSNVYADSFVVKGDDVRQIAPGQTGVIADYNYKLPDDFMGCVLAWNTRNIDATSTGNYNYKYRYLRHGKLRPFERDISNVPFSPDGKPCTPPALNCYWPLNDYGFYTTTGIGYQPYRVVVLSFELLNAPATVCGPKLSTDLIKNQCVNFNFNGLTGTGVLTPSSKRFQPFQQFGRDVSDFTDSVRDPKTSEILDISPCSFGGVSVITPGTNASSEVAVLYQDVNCTDVSTAIHADQLTPAWRIYSTGNNVFQTQAGCLIGAEHVDTSYECDIPIGAGICASYHTVSLLRSTSQKSIVAYTMSLGADSSIAYSNNTIAIPTNFSISITTEVMPVSMAKTSVDCNMYICGDSTECANLLLQYGSFCTQLNRALSGIAAEQDRNTREVFAQVKQMYKTPTLKYFGGFNFSQILPDPLKPTKRSFIEDLLFNKVTLADAGFMKQYGECLGDINARDLICAQKFNGLTVLPPLLTDDMIAAYTAALVSGTATAGWTFGAGAALQIPFAMQMAYRFNGIGVTQNVLYENQKQIANQFNKAISQIQESLTTTSTALGKLQDVVNQNAQALNTLVKQLSSNFGAISSVLNDILSRLDKVEAEVQIDRLITGRLQSLQTYVTQQLIRAAEIRASANLAATKMSECVLGQSKRVDFCGKGYHLMSFPQAAPHGVVFLHVTYVPSQERNFTTAPAICHEGKAYFPREGVFVFNGTSWFITQRNFFSPQIITTDNTFVSGNCDVVIGIINNTVYDPLQPELDSFKEELDKYFKNHTSPDVDLGDISGINASVVNIQKEIDRLNEVAKNLNESLIDLQELGKYEQYIKWPWYVWLGFIAGLIAIVMVTILLCCMTSCCSCLKGACSCGSCCKFDEDDSEPVLKGVKLHYT

SEQ ID NO: 120 - protein, 1255 aa, Unknown
  SARS-related coronavirus Spike glycoprotein
MFIFLLFLTLTRGSDLDRCTTFDDVQAPNYTQHTSSMRGVYYPDEIFRSDTLYLTQDLFLPFYSNVTGFHTINHTFGNPVIPFKDGIYFAATEKSNVVRGWVFGSTMNNKSQSVIIINNSTNVVIRACNFELCDNPFFAVSKPMGTQTHTMIFDNAFNCTFEYISDAFSLDVSEKSGNFKHLREFVFKNKDGFLYVYKGYQPIDVVRDLPSGFNTLKPIFKLPLGINITNFRAILTAFSPAQDIWGTSAAAYFVGYLKPTTFMLKYDENGTITDAVDCSQNPLAELKCSVKSFEIDKGIYQTSNFRVVPSGDVVRFPNITNLCPFGEVFNATKFPSVYAWERKKISNCVVDYSVLYNSTFFSTFKCYGVSATKLNDLCFSNVYADSFVVKGDDVRQIAPGQTGVIADYNYKLPDDFMGCVLAWNTRNIDATSTGNYNYKYRYLRHGKLRPFERDISNVPFSPDGKPCTPPALNCYWPLNDYGFYTTTGIGYQPYRVVVLSFELLNAPATVCGPKLSTDLIKNQCVNFNFNGLTGTGVLTPSSKRFQPFQQFGRDVSDFTDSVRDPKTSEILDISPCSFGGVSVITPGTNASSEVAVLYQDVNCTDVSTAIHADQLTPAWRIYSTGNNVFQTQAGCLIGAEHVDTSYECDIPIGAGICASYHTVSLLRSTSQKSIVAYTMSLGADSSIAYSNNTIAIPTNFSISITTEVMPVSMAKTSVDCNMYICGDSTECANLLLQYGSFCTQLNRALSGIAAEQDRNTREVFAQVKQMYKTPTLKYFGGFNFSQILPDPLKPTKRSFIEDLLFNKVTLADAGFMKQYGECLGDINARDLICAQKFNGLTVLPPLLTDDMIAAYTAALVSGTATAGWTFGAGAALQIPFAMQMAYRFNGIGVTQNVLYENQKQIANQFNKAISQIQESLTTTSTALGKLQDVVNQNAQALNTLVKQLSSNFGAISSVLNDILSRLDKVEAEVQIDRLITGRLQSLQTYVTQQLIRAAEIRASANLAATKMSECVLGQSKRVDFCGKGYHLMSFPQAAPHGVVFLHVTYVPSQERNFTTAPAICHEGKAYFPREGVFVFNGTSWFITQRNFFSPQIITTDNTFVSGNCDVVIGIINNTVYDPLQPELDSFKEELDKYFKNHTSPDVDLGDISGINASVVNIQKEIDRLNEVAKNLNESLIDLQELGKYEQYIKWPWYVWLGFIAGLIAIVMVTILLCCMTSCCSCLKGACSCGSCCKFDEDDSEPVLKGVKLHYT

SEQ ID NO: 121 - protein, 1255 aa, Unknown
  SARS coronavirus BJ302 Spike glycoprotein
MFIFLLFLTLTSGSDLDRCTTFDDVQAPNYTQHTSSMRGVYYPDEIFRSDTLYLTQDLFLPFYSNVTGFHTINHTFGNPVIPFKDGIYFAATEKSNVVRGWVFGSTMNNKSQSVIIINNSTNVVIRACNFELCDNPFFAVSKPMGTQTHTMIFDNAFNCTFEYISDAFSLDVSEKSGNFKHLREFVFKNKDGFLYVYKGYQPIDVVRDLPSGFNTLKPIFKLPLGINITNFRAILTAFSPAQDTWGTSAAAYFVGYLKPTTFMLKYDENGTITDAVDCSQNPLAELKCSVKSFEIDKGIYQTSNFRVVPSGDVVRFPNITNLCPFGEVFNATKFPSVYAWERKKISNCVADYSVLYNSTFFSTFKCYGVSATKLNDLCFSNVYADSFVVKGDDVRQIAPGQTGVIADYNYKLPDDFMGCVLAWNTRNIDATSTGNYNYKYRYLRHGKLRPFERDISNVPFSPDGKPCTPPALNCYWPLNDYGFYTTTGIGYQPYRVVVLSFELLNAPATVCGPKLSTDLIKNQCVNFNFNGLTGTGVLTPSSKRFQPFQQFGRDVSDFTDSVRDPKTSEILDISPCSFGGVSVITPGTNASSEVAVLYQDVNCTDVSTAIHADQLTPAWRIYSTGNNVFQTQAGCLIGAEHVDTSYECDIPIGAGICASYHTVSLLRSTSQKSIVAYTMSLGADSSIAYSNNTIAIPTNFSISITTEVMPVSMAKTSVDCNMYICGDSTECANLLLQYGSFCTQLNRALSGIAAEQDRNTREVFAQVKQMYKTPTLKYFGGFNFSQILPDPLKPTKRSFIEDLLFNKVTLADAGFMKQYGECLGDINARDLICAQKFNGLTVLPPLLTDDMIAAYTAALVSGTATAGWTFGAGAALQIPFAMQMAYRFNGIGVTQNVLYENQKQIANQFNKAISQIQESLTTTSTALGKLQDVVNQNAQALNTLVKQLSSNFGAISSVLNDILSRLDKVEAEVQIDRLITGRLQSLQTYVTQQLIRAAEIRASANLAATKMSECVLGQSKRVDFCGKGYHLMSFPQAAPHGVVFLHVTYVPSQERNFTTAPAICHEGKAYFPREGVFVFNGTSWFITQRNFFSPQIITTDNTFVSGNCDVVIGIINNTVYDPLQPELDSFKEELDKYFKNHTSPDVDLGDISGINASVVNIQKEIDRLNEVAKNLNESLIDLQELGKYEQYIKWPWYVWLGFIAGLIAIVMVTILLCCMTSCCSCLKGACSCGSCCKFDEDDSEPVLKGVKLHYT

SEQ ID NO: 122 - protein, 1255 aa, Unknown
  SARS coronavirus TJF Spike glycoprotein
MFIFLLFLTLTSGSDLDRCTTFDDVQAPNYTQHTSSMRGVYYPDEIFRSDTLYLTQDLFLPFYSNVTGFHTINHTFGNPVIPFKDGIYFAATEKSNVVRGWVFGSTMNNKSQSVIIINNSTNVVIRACNFELCDNPFFAVSKPMGTQTHTMIFDNAFNCTFEYISDAFSLDVSEKSGNFKHLREFVFKNKDGFLYVYKGYQPIDVVRDLPSGFNTLKPIFKLPLGINITNFRAILTAFSPAQDTWGTSAAAYFVGYLKPTTFMLKYDENGTITDAVDCSQNPLAELKCSVKSFEIDKGIYQTSNFRVVPSGDVVRFPNITNLCPFGEVFNATKFPSVYAWERKKISNCVADYSVLYNSTFFSTFKCYGVSATKLNDLCFSNVYADSFVVKGDDVRQIAPGQTGVIADYNYKLPDDFMGCVLAWNTRNIDATSTGNYNYKYRYLRHGKLRPFERDISNVPFSPDGKPCTPPALNCYWPLNDYGFYTTTGIGYQPYRVVVLSFELLNAPATVCGPKLSTDLIKNQCVNFNFNGLTGTGVLTPSSKRFQPFQQFGRDVSDFTDSVRDPKTSEILDISPCSFGGVSVITPGTNASSEVAVLYQDVNCTDVSTAIHADQLTPAWRIYSTGNNVFQTQAGCLIGAEHVDTSYECDIPIGAGICASYHTVSLLRNTSQKSIVAYTMSLGADSSIAYSNNTIAIPTNFSISITTEVMPVSMAKTSVDCNMYICGDSTECANLLLQYGSFCTQLNRALSGIAAEQDRNTREVFAQVKQMYKTPTLKYFGGFNFSQILPDPLKPTKRSFIEDLLFNKVTLADAGFMKQYGECLGDINARDLICAQKFNGLTVLPPLLTDDMIAAYTAALVSGTATAGWTFGAGAALQIPFAMQMAYRFNGIGVTQNVLYENQKQIANQFNKAISQIQESLTTTSTALGKLQDVVNQNAQALNTLVKQLSSNFGAISSVLNDILSRLDKVEAEVQIDRLITGRLQSLQTYVTQQLIRAAEIRASANLAATKMSECVLGQSKRVDFCGKGYHLMSFPQAAPHGVVFLHVTYVPSQERNFTTAPAICHEGKAYFPREGVFVFNGTSWFITQRNFFSPQIITTDNTFVSGKCDVVIGIINNTVYDPLQPELDSFKEELDKYFKNHTSPDVDLGDISGINASVVNIQKEIDRLNEVAKNLNESLIDLQELGKYEQYIKWPWYVWLGFIAGLIAIVMVTILLCCMTSCCSCLKGACSCGSCCKFDEDDSEPVLKGVKLHYT

SEQ ID NO: 123 - protein, 1255 aa, Unknown
  SARS coronavirus NS-1 Spike glycoprotein S
MFIFLLFLTLTSGSDLDRCTTFDDVQAPNYTQHTSSMRGVYYPDEIFRSDTLYLTQDLFLPFYSNVTGFHTINHTFGNPVIPFKDGIYFAATEKSNVVRGWVFGSTMNNKSQSVIIINNSTNVVIRACNFELCDNPFFAVSKPMGTQTHTMIFDNAFNCTFEYISDAFSLDVSEKSGNFKHLREFVFKNKDGFLYVYKGYQPIDVVRDLPSGFNTLKPIFKLPLGINITNFRAILTAFSPAQDTWGTSAAAYFVGYLKPTTFMLKYDENGTITDAVDCSQNPLAELKCSVKSFEIDKGIYQTSNFRVVPSGDVVRFPNITNLCPFGEVFNATKFPSVYAWERKKISNCVADYSVLYNSTFFSTFKCYGVSATKLNDLCFSNVYADSFVVKGDDVRQIAPGQTGVIADYNYKLPDDFMGCVLAWNTRNIDATSTGNYNYKYRYLRHGKLRPFERDISNVPFSPDGKPCTPPALNCYWPLNDYGFYTTTGIGYQPYRVVVLSFELLNAPATVCGPKLSTDLIKNQCVNFNFNGLTGTGVLTPSSKRFQPFQQFGRDVSDFTDSVRDPKTSEILDISPCSFGGVSVITPGTNASSEVAVLYQDVNCTDVSTAIHADQLTPAWRIYSTGNNVFQTQAGCLIGAEHVDTSYECDIPIGAGICASYHTVSLLRSTSQKSIVAYTMSLGADSSIAYSNNTIAIPTNFSISITTEVMPVSMAKTSVDCNMYICGDSTECANLLLQYGSFCTQLNRALSGIAAEQDRNTREVFAQVKQMYKTPTLKYFGGFNFSQILPDPLKPTKRSFIEDLLFNKVTLADAGFMKQYGECLGDINARDLICAQKFNGLTVLPPLLTDDMIAAYTAALVSGTATAGWTFGAGAALQIPFAMQMAYRFNGIGVTQNVLYENQKQIANQFNKAISQIQESLTTTSTALGKLQDVVNQNAQALNTLVKQLSSNFGAISSVLNDILSRLDKVEAEVQIDRLITGRLQSLQTYVTQQLIRAAEIMASANLAATKMSECVLGQSKRVDFCGKGYHLMSFPQAAPHGVVFLHVTYVPSQERNFTTAPAICHEGKAYFPREGVFVFNGTSWFITQRNFFSPQIITTDNTFVSGNCDVVIGIINNTVYDPLQPELDSFKEELDKYFKNHTSPDVDLGDISGINASVVNIQKEIDRLNEVAKNLNESLIDLQELGKYEQYIKWPWYVWLGFIAGLIAIVMVTILLCCMTSCCSCLKGACSCGSCCKFDEDDSEPVLKGVKLHYT

SEQ ID NO: 124 - protein, 1255 aa, Unknown; identical to SEQ ID NO: 1
  SARS coronavirus BJ01 Spike glycoprotein S

SEQ ID NO: 125 - protein, 1255 aa, Unknown
  SARS coronavirus HHS-2004 Spike protein
MAIFLLFLTLTSGSDLDRCTTFDDVQAPNYTQHTSSMRGVYYPDEIFRSDTLYLTQDLFLPFYSNVTGFHTINHTFDNPVIPFKDGIYFAATEKSNVVRGWVFGSTMNNKSQSVIIINNSTNVVIRACNFELCDNPFFAVSKPMGTQTHTMIFDNAFNCTFEYISDAFSLDVSEKSGNFKHLREFVFKNKDGFLYVYKGYQPIDVVRDLPSGFNTLKPIFKLPLGINITNFRAILTAFSPAQDTWGTSAAAYFVGYLKPTTFMLKYDENGTITDAVDCSQNPLAELKCSVKSFEIDKGIYQTSNFRVVPSGDVVRFPNITNLCPFGEVFNATKFPSVYAWERKKISNCVADYSVLYNSTFFSTFKCYGVSATKLNDLCFSNVYADSFVVKGDDVRQIAPGQTGVIADYNYKLPDDFMGCVLAWNTRNIDATSTGNYNYKYRYLKHGKLRPFERDISNVPFSPDGKPCTPPALNCYWPLNDYGFYTTTGIGYQPYRVVVLSFELLNAPATVCGPKLSTDLIKNQCVNFNFNGLTGTGVLTPSSKRFQPFQQFGRDVSDFTDSVRDPKTSEILDISPCSFGGVSVITPGTNASSEVAVLYQDVNCTDVSTAIHADQLTPAWRIYSTGNNVFQTQAGCLIGAEHVDTSYECDIPIGAGICASYHTVSLLRSTSQKSIVAYTMSLGADSSIAYSNNTIAIPTNFSISITTEVMPVSMAKTSVDCNMYICGDSTECANLLLQYGSFCTQLNRALSGIAAEQDRNTREVFAQVKQMYKTPTLKYFGGFNFSQILPDPLKPTKRSFIEDLLFNKVTLADAGFMKQYGECLGDINARDLICAQKFNGLTVLPPLLTDDMIAAYTAALVSGTATAGWTFGAGAALQIPFAMQMAYRFNGIGVTQNVLYENQKQIANQFNKAISQIQESLTTTSTALGKLQDVVNQNAQALNTLVKQLSSNFGAISSVLNDVLSRLDKVEAEVQIDRLITGRLQSLQTYVTQQLIRAAEIRASANLAATKMSECVLGQSKRVDFCGKGYHLMSFPQAAPHGVVFLHVTYVPSQERNFTTAPAICHEGKAYFPREGVFVFNGTSWFITQRNFFSPQIITTDNTFVSGNCDVVIGIINNTVYDPLQPELDSFKEELDKYFKNHTSPDVDLGDISGINASVVNIQKEIDRLNEVAKNLNESLIDLQELGKYEQYIKWPWYVWLGFIAGLIAIVMVTILLCCMTSCCSCLKGACSCGSCCKFDEDDSEPVLKGVKLHYT

SEQ ID NO: 126 - protein, 1255 aa, Unknown
  SARS coronavirus WH20 Spike glycoprotein S
MFIFLLFLTLTSGSDLDRCTTFDDVQAPNYTQHTSSMRGVYYPDEIFRSDTLYLTQDLFLPFYSNVTGFHTINHTFDNPVIPFKDGIYFAATEKSNVVRGWVFGSTMNNKSQSVIIINNSTNVVIRACNFELCDNPFFAVSKPMGTQTHTMIFDNAFNCTFEYISDAFSLDVSEKSGNFKHLREFVFKNKDGFLYVYKGYQPIDVVRDLPSGFNTLKPIFKLPLGINITNFRAILTAFSPAQDTWGTSAAAYFVGYLKPTTFMLKYDENGTITDAVDCSQNPLAELKCSVKSFEIDKGIYQTSNFRVVPSGDVVRFPNITNLCPFGEVFNATKFPSVYAWERKKISNCVADYSVLYNSTFFSTFKCYGVSATKLNDLCFSNVYADSFVVKGDDVRQIAPGQTGVIADYNYKLPDDFMGCVLAWNTRNIDATSTGNYNYKYRYLRHGKLRPFERDISNVPFSPDGKPCTPPALNCYWPLNDYGFYTTTGIGYQPYRVVVLSFELLNAPATVCGPKLSTDLIKNQCVNFNFNGLTGTGVLTPSSKRFQPFQQFGRDVSDFTDSVRDPKTSEILDISPCSFGGVSVITPGTNASSEVAVLYQDVNCTDVSTAIHADQLTPAWRIYSTGNNVFQTQAGCLIGAEHVDTSYECDIPIGAGICASYHTVSLLRSTSQKSIVAYTMSLGADSSIAYSNNTIAIPTNFSISITTEVMPVSMAKTSVDCNMYICGDSTECANLLLQYGSFCTQLNRALSGIAAEQDRNTREVFAQVKQMYKTPTLKYFGGFNFSQILPDPLKPTKRSFIEDLLFNKVTLADAGFMKQYGECLGDINARDLICAQKFNGLTVLPPLLTDDMIAAYTAALVSGTATAGWTFGAGAALQIPFAMQMAYRFNGIGVTQNVLYENQKQIANQFNKAISQIQESLTTTSTALGKLQDVVNQNAQALNTLVKQLSSNFGAISSVLNDILSRLDKVEAEVQIDRLITGRLQSLQTYVTQQLIRAAEIRASANLAATKMSECVLGQSKRVDFCGKGYHLMSFPQAAPHGVVFLHVTYVPSQERNFTTAPAICHEGKAYFPREGVFVFNGTSWFITQRNFFSPQIITTDNTFVSGNCDVVIGIINNTVYDPLQPELDSFKEELDKYFKNHTSPDVDLGDISGINASVVNIQKEIDRLNEVAKNLNESLIDLQELGKYEQYIKWPWYVWLGFIAGLMAIVMVTILLCCMTSCCSCLKGACSCGSCCKFDEDDSEPVLKGVKLHYT

SEQ ID NO: 127 - protein, 1255 aa, Unknown
  SARS coronavirus BJ302 Spike glycoprotein
MFIFLLFFTLTSGSDLDRCTTFDDVQAPNYTQHTSSMRGVYYPDEIFRSDTLYLTQDLFLPFYSNVTGFHTINHTFGNPVIPFKDGIYFAATEKSNVVRGWVFGSTMNNKSQSVIIINNSTNVVIRACNFELCDNPFFAVSKPMGTQTHTMIFDNAFNCTFEYISDAFSLDVSEKSGNFKHLREFVFKNKDGFLYVYKGYQPIDVVRDLPSGFNTLKPIFKLPLGINITNFRAILTAFSPAQDTWGTSAAAYFVGYLKPTTFMLKYDENGTITDAVDCSQNPLAELKCSVKSFEIDKGIYQTSNFRVVPSGDVVRFPNITNLCPFGEVFNATKFPSVYAWERKKISNCVADYSVLYNSTFFSTFKCYGVSATKLNDLCFSNVYADSFVVKGDDVRQIAPGQTGVIADYNYKLPDDFMGCVLAWNTRNIDATSTGNYNYKYRYLRHGKLRPFERDISNVPFSPDGKPCTPPALNCYWPLNDYGFYTTTGIGYQPYRVVVLSFELLNAPATVCGPKLSTDLIKNQCVNFNFNGLTGTGVLTPSSKRFQPFQQFGRDVSDFTDSVRDPKTSEILDISPCSFGGVSVITPGTNASSEVAVLYQDVNCTDVSTAIHADQLTPAWRIYSTGNNVFQTQAGCLIGAEHVDTSYECDIPIGAGICASYHTVSLLRSTSQKSIVAYTMSLGADSSIAYSNNTIAIPTNFSISITTEVMPVSMAKTSVDCNMYICGDSTECANLLLQYGSFCTQLNRALSGIAAEQDRNTREVFAQVKQMYKTPTLKYFGGFNFSQILPDPLKPTKRSFIEDLLFNKVTLADAGFMKQYGECLGDINARDLICAQKFNGLTVLPPLLTDDMIAAYTAALVSGTATAGWTFGAGAALQIPFAMQMAYRFNGIGVTQNVLYENQKQIANQFNKAISQIQESLTTTSTALGKLQDVVNQNAQALNTLVKQLSSNFGAISSVLNDILSRLDKVEAEVQIDRLITGRLQSLQTYVTQQLIRAAEIRASANLAATKMSECVLGQSKRVGFCGKGYHLMSFPQAAPHGVVFLHVTYVPSQERNFTTAPAICHEGKAYFPREGVFVFNGTSWFITQRNFFSPQIITTDNTFVSGNCDVVIGIINNTVYDPLQPELDSFKEELDKYFKNHTSPDVDLGDISGINASVVNIQKEIDRLNEVAKNLNESLIDLQELGKYEQYIKWPWYVWLGFIAGLIAIVMVTILLCCMTSCCSCLKGACSCGSCCKFDEDDSEPVLKGVKLHYT

SEQ ID NO: 128 - protein, 1255 aa, Unknown
  SARS coronavirus BJ302 Spike glycoprotein
MFIFLLFFTLTSGSDLDRCTTFDDVQAPNYTQHTSSMRGVYYPDEIFRSDTLYLTQDLFLPFYSNVTGFHTINHTFGNPVIPFKDGIYFAATEKSNVVRGWVFGSTMNNKSQSVIIINNSTNVVIRACNFELCDNPFFAVSKPMGTQTHTMIFDNAFNCTFEYISDAFSLDVSEKSGNFKHLREFVFKNKDGFLYVYKGYQPIDVVRDLPSGFNTLKPIFKLPLGINITNFRAILTAFSPAQDTWGTSAAAYFVGYLKPTTFMLKYDENGTITDAVDCSQNPLAELKCSVKSFEIDKGIYQTSNFRVVPSGDVVRFPNITNLCPFGEVFNATKFPSVYAWERKKISNCVADYSVLYNSTFFSTFKCYGVSATKLNDLCFSNVYADSFVVKGDDVRQIAPGQTGVIADYNYKLPDDFMGCVLAWNTRNIDATSTGNYNYKYRYLRHGKLRPFERDISNVPFSPDGKPCTPPALNCYWPLSDYGFYTTTGIGYQPYRVVVLSFELLNAPATVCGPKLSTDLIKNQCVNFNFNGLTGTGVLTPSSKRFQPFQQFGRDVSDFTDSVRDPKTSEILDISPRSFGGVSVITPGTNASSEVAVLYQDVNCTDVSTAIHADQLTPAWRIYSTGNNVFQTQAGCLIGAEHVDTSYECDIPIGAGICASYHTVSLLRSTSQKSIVAYTMSLGADSSIAYSNNTIAIPTNFSISITTEVMPVSMAKTSVDCNMYICGDSTECANLLLQYGSFCTQLNRALSGIAAEQDRNTREVFAQVKQMYKTPTLKYFGGFNFSQILPDPLKPTKRSFIEDLLFNKVTLADAGFMKQYGECLGDINARDLICAQKFNGLTVLPPLLTDDMIAAYTAALVSGTATAGWTFGAGAALQIPFAMQMAYRFNGIGVTQNVLYENQKQIANQFNKAISQIQESLTTTSTALGKLQDVVNQNAQALNTLVKQLSSNFGAISSVLNDILSRLDKVEAEVQIDRLITGRLQSLQTYVTQQLIRAAEIRASANLAATKMSECVLGQSKRVGFCGKGYHLMSFPQAAPHGVVFLHVTYVPSQERNFTTAPAICHEGKAYFPREGVFVFNGTSWFITQRNFFSPQIITTDNTFVSGNCDVVIGIINNTVYDPLQPELDSFKEELDKYFKNHTSPDVDLGDISGINASVVNIQKEIDRLNEVAKNLNESLIDLQELGKYEQYIKWPWYVWLGFIAGLIAIVMVTILLCCMTSCCSCLKGACSCGSCCKFDEDDSEPVLKGVKLHYT

SEQ ID NO: 129 - protein, 1255 aa, Unknown
  SARS coronavirus BJ302 Spike glycoprotein
MFIFLLFFTLTSGSDLDRCTTFDDVQAPNYTQHTSSMRGVYYPDEIFRSDTLYLTQDLFLPFYSNVTGFHTINHTFGNPVIPFKDGIYFAATEKSNVVRGWVFGSTMNNKSQSVIIINNSTNVVIRACNFELCDNPFFAVSKPMGTQTHTMIFDNAFNCTFEYISDAFSLDVSEKSGNFKHLREFVFKNKDGFLYVYKGYQPIDVVRDLPSGFNTLKPIFKLPLGINITNFRAILTAFSPAQDTWGTSAAAYFVGYLKPTTFMLKYDENGTITDAVDCSQNPLAELKCSVKSFEIDKGIYQTSNFRVVPSGDVVRFPNITNLCPFGEVFNATKFPSVYAWERKKISNCVADYSVLYNSTFFSTFKCYGVSATKLNDLCFSNVYADSFVVKGDDVRQIAPGQTGVIADYNYKLPDDFMGCVLAWNTRNIDATSTGNYNYKYRYLRHGKLRPFERDISNVPFSPDGKPCTPPALNCYWPLSDYGFYTTTGIGYQPYRVVVLSFELLNAPATVCGPKLSTDLIKNQCVNFNFNGLTGTGVLTPSSKRFQPFQQFGRDVSDFTDSVRDPKTSEILDISPCSFGGVSVITPGTNASSEVAVLYQDVNCTDVSTAIHADQLTPAWRIYSTGNNVFQTQAGCLIGAEHVDTSYECDIPIGAGICASYHTVSLLRSTSQKSIVAYTMSLGADSSIAYSNNTIAIPTNFSISITTEVMPVSMAKTSVDCNMYICGDSTECANLLLQYGSFCTQLNRALSGIAAEQDRNTREVFAQVKQMYKTPTLKYFGGFNFSQILPDPLKPTKRSFIEDLLFNKVTLADAGFMKQYGECLGDINARDLICAQKFNGLTVLPPLLTVDMIAAYTAALVSGTATAGWTFGAGAALQIPFAMQMAYRFNGIGVTQNVLYENQKQIANQFNKAISQIQESLTTTSTALGKLQDVVNQNAQALNTLVKQLSSNFGAISSVLNDILSRLDKVEAEVQIDRLITGRLQSLQTYVTQQLIRAAEIRASANLAATKMSECVLGQSKRVGFCGKGYHLMSFPQAAPHGVVFLHVTYVPSQERNFTTAPAICHEGKAYFPREGVFVFNGTSWFITQRNFFSPQIITTDNTFVSGNCDVVIGIINNTVYDPLQPELDSFKEELDKYFKNHTSPDVDLGDISGINASVVNIQKEIDRLNEVAKNLNESLIDLQELGKYEQYIKWPWYVWLGFIAGLIAIVMVTILLCCMTSCCSCLKGACSCGSCCKFDEDDSEPVLKGVKLHYT

SEQ ID NO: 130 - protein, 1255 aa, Unknown
  SARS coronavirus BJ302 Spike glycoprotein
MFIFLLFFTLTSGSDLDRCTTFDDVQAPNYTQHTSSMRGVYYPDEIFRSDTLYLTQDLFLPFYSNVTGFHTINHTFGNPVIPFKDGIYFAATEKSNVVRGWVFGSTMNNKSQSVIIINNSTNVVIRACNFELCDNPFFAVSKPMGTQTHTMIFDNAFNCTFEYISDAFSLDVSEKSGNFKHLREFVFKNKDGFLYVYKGYQPIDVVRDLPSGFNTLKPIFKLPLGINITNFRAILTAFSPAQDTWGTSAAAYFVGYLKPTTFMLKYDENGTITDAVDCSQNPLAELKCSVKSFEIDKGIYQTSNFRVVPSGDVVRFPNITNLCPFGEVFNATKFPSVYAWERKKISNCVADYSVLYNSTFFSTFKCYGVSATKLNDLCFSNVYADSFVVKGDDVRQIAPGQTGVIADYNYKLPDDFMGCVLAWNTRNIDATSTGNYNYKYRYLRHGKLRPFERDISNVPFSPDGKPCTPPALNCYWPLSDYGFYTTTGIGYQPYRVVVLSFELLNAPATVCGPKLSTDLIKNQCVNFNFNGLTGTGVLTPSSKRFQPFQQFGRDVSDFTDSVRDPKTSEILDISPRSFGGVSVITPGTNASSEVAVLYQDVNCTDVSTAIHADQLTPAWRIYSTGNNVFQTQAGCLIGAEHVDTSYECDIPIGAGICASYHTVSLLRSTSQKSIVAYTMSLGADSSIAYSNNTIAIPTNFSISITTEVMPVSMAKTSVDCNMYICGDSTECANLLLQYGSFCTQLNRALSGIAAEQDRNTREVFAQVKQMYKTPTLKYFGGFNFSQILPDPLKPTKRSFIEDLLFNKVTLADAGFMKQYGECLGDINARDLICAQKFNGLTVLPPLLTVDMIAAYTAALVSGTATAGWTFGAGAALQIPFAMQMAYRFNGIGVTQNVLYENQKQIANQFNKAISQIQESLTTTSTALGKLQDVVNQNAQALNTLVKQLSSNFGAISSVLNDILSRLDKVEAEVQIDRLITGRLQSLQTYVTQQLIRAAEIRASANLAATKMSECVLGQSKRVGFCGKGYHLMSFPQAAPHGVVFLHVTYVPSQERNFTTAPAICHEGKAYFPREGVFVFNGTSWFITQRNFFSPQIITTDNTFVSGNCDVVIGIINNTVYDPLQPELDSFKEELDKYFKNHTSPDVDLGDISGINASVVNIQKEIDRLNEVAKNLNESLIDLQELGKYEQYIKWPWYVWLGFIAGLIAIVMVTILLCCMTSCCSCLKGACSCGSCCKFDEDDSEPVLKGVKLHYT

SEQ ID NO: 131 - protein, 1255 aa, Unknown
  SARS coronavirus BJ302 Spike glycoprotein
MFIFLLFLTLTSGSDLDRCTTFDDVQAPNYTQHTSSMRGVYYPDEIFRSDTLYLTQDLFLPFYSNVTGFHTINHTFGNPVIPFKDGIYFAATEKSNVVRGWVFGSTMNNKSQSVIIINNSTNVVIRACNFELCDNPFFAVSKPMGTQTHTMIFDNAFNCTFEYISDAFSLDVSEKSGNFKHLREFVFKNKDGFLYVYKGYQPIDVVRDLPSGFNTLKPIFKLPLGINITNFRAILTAFSPAQDTWGTSAAAYFVGYLKPTTFMLKYDENGTITDAVDCSQNPLAELKCSVKSFEIDKGIYQTSNFRVVPSGDVVRFPNITNLCPFGEVFNATKFPSVYAWERKKISNCVADYSVLYNSTFFSTFKCYGVSATKLNDLCFSNVYADSFVVKGDDVRQIAPGQTGVIADYNYKLPDDFMGCVLAWNTRNIDATSTGNYNYKYRYLRHGKLRPFERDISNVPFSPDGKPCTPPALNCYWPLSDYGFYTTTGIGYQPYRVVVLSFELLNAPATVCGPKLSTDLIKNQCVNFNFNGLTGTGVLTPSSKRFQPFQQFGRDVSDFTDSVRDPKTSEILDISPRSFGGVSVITPGTNASSEVAVLYQDVNCTDVSTAIHADQLTPAWRIYSTGNNVFQTQAGCLIGAEHVDTSYECDIPIGAGICASYHTVSLLRSTSQKSIVAYTMSLGADSSIAYSNNTIAIPTNFSISITTEVMPVSMAKTSVDCNMYICGDSTECANLLLQYGSFCTQLNRALSGIAAEQDRNTREVFAQVKQMYKTPTLKYFGGFNFSQILPDPLKPTKRSFIEDLLFNKVTLADAGFMKQYGECLGDINARDLICAQKFNGLTVLPPLLTVDMIAAYTAALVSGTATAGWTFGAGAALQIPFAMQMAYRFNGIGVTQNVLYENQKQIANQFNKAISQIQESLTTTSTALGKLQDVVNQNAQALNTLVKQLSSNFGAISSVLNDILSRLDKVEAEVQIDRLITGRLQSLQTYVTQQLIRAAEIRASANLAATKMSECVLGQSKRVGFCGKGYHLMSFPQAAPHGVVFLHVTYVPSQERNFTTAPAICHEGKAYFPREGVFVFNGTSWFITQRNFFSPQIITTDNTFVSGNCDVVIGIINNTVYDPLQPELDSFKEELDKYFKNHTSPDVDLGDISGINASVVNIQKEIDRLNEVAKNLNESLIDLQELGKYEQYIKWPWYVWLGFIAGLIAIVMVTILLCCMTSCCSCLKGACSCGSCCKFDEDDSEPVLKGVKLHYT

SEQ ID NO: 132 - protein, 1255 aa, Unknown
  SARS coronavirus BJ302 Spike glycoprotein
MFIFLLFFTLTSGSDLDRCTTFDDVQAPNYTQHTSSMRGVYYPDEIFRSDTLYLTQDLFLPFYSNVTGFHTINHTFGNPVIPFKDGIYFAATEKSNVVRGWVFGSTMNNKSQSVIIINNSTNVVIRACIFELCDNPFFAVSKPMGTQTHTMIFDNAFNCTFEYISDAFSLDVSEKSGNFKHLREFVFKNKDGFLYVYKGYQPIDVVRDLPSGFNTLKPIFKLPLGINITNFRAILTAFSPAQDTWGTSAAAYFVGYLKPTTFMLKYDENGTITDAVDCSQNPLAELKCSVKSFEIDKGIYQTSNFRVVPSGDVVRFPNITNLCPFGEVFNATKFPSVYAWERKKISNCVADYSVLYNSTFFSTFKCYGVSATKLNDLCFSNVYADSFVVKGDDVRQIAPGQTGVIADYNYKLPDDFMGCVLAWNTRNIDATSTGNYNYKYRYLRHGKLRPFERDISNVPFSPDGKPCTPPALNCYWPLSDYGFYTTTGIGYQPYRVVVLSFELLNAPATVCGPKLSTDLIKNQCVNFNFNGLTGTGVLTPSSKRFQPFQQFGRDVSDFTDSVRDPKTSEILDISPRSFGGVSVITPGTNASSEVAVLYQDVNCTDVSTAIHADQLTPAWRIYSTGNNVFQTQAGCLIGAEHVDTSYECDIPIGAGICASYHTVSLLRSTSQKSIVAYTMSLGADSSIAYSNNTIAIPTNFSISITTEVMPVSMAKTSVDCNMYICGDSTECANLLLQYGSFCTQLNRALSGIAAEQDRNTREVFAQVKQMYKTPTLKYFGGFNFSQILPDPLKPTKRSFIEDLLFNKVTLADAGFMKQYGECLGDINARDLICAQKFNGLTVLPPLLTVDMIAAYTAALVSGTATAGWTFGAGAALQIPFAMQMAYRFNGIGVTQNVLYENQKQIANQFNKAISQIQESLTTTSTALGKLQDVVNQNAQALNTLVKQLSSNFGAISSVLNDILSRLDKVEAEVQIDRLITGRLQSLQTYVTQQLIRAAEIRASANLAATKMSECVLGQSKRVGFCGKGYHLMSFPQAAPHGVVFLHVTYVPSQERNFTTAPAICHEGKAYFPREGVFVFNGTSWFITQRNFFSPQIITTDNTFVSGNCDVVIGIINNTVYDPLQPELDSFKEELDKYFKNHTSPDVDLGDISGINASVVNIQKEIDRLNEVAKNLNESLIDLQELGKYEQYIKWPWYVWLGFIAGLIAIVMVTILLCCMTSCCSCLKGACSCGSCCKFDEDDSEPVLKGVKLHYT

SEQ ID NO: 133 - protein, 1255 aa, Unknown
  SARS coronavirus BJ302 Spike glycoprotein
MFIFLLFLTLTSGSDLDRCTTFDDVQAPNYTQHTSSMRGVYYPDEIFRSDTLYLTQDLFLPFYSNVTGFHTINHTFGNPVIPFKDGIYFAATEKSNVVRGWVFGSTMNNKSQSVIIINNSTNVVIRACIFELCDNPFFAVSKPMGTQTHTMIFDNAFNCTFEYISDAFSLDVSEKSGNFKHLREFVFKNKDGFLYVYKGYQPIDVVRDLPSGFNTLKPIFKLPLGINITNFRAILTAFSPAQDTWGTSAAAYFVGYLKPTTFMLKYDENGTITDAVDCSQNPLAELKCSVKSFEIDKGIYQTSNFRVVPSGDVVRFPNITNLCPFGEVFNATKFPSVYAWERKKISNCVADYSVLYNSTFFSTFKCYGVSATKLNDLCFSNVYADSFVVKGDDVRQIAPGQTGVIADYNYKLPDDFMGCVLAWNTRNIDATSTGNYNYKYRYLRHGKLRPFERDISNVPFSPDGKPCTPPALNCYWPLSDYGFYTTTGIGYQPYRVVVLSFELLNAPATVCGPKLSTDLIKNQCVNFNFNGLTGTGVLTPSSKRFQPFQQFGRDVSDFTDSVRDPKTSEILDISPRSFGGVSVITPGTNASSEVAVLYQDVNCTDVSTAIHADQLTPAWRIYSTGNNVFQTQAGCLIGAEHVDTSYECDIPIGAGICASYHTVSLLRSTSQKSIVAYTMSLGADSSIAYSNNTIAIPTNFSISITTEVMPVSMAKTSVDCNMYICGDSTECANLLLQYGSFCTQLNRALSGIAAEQDRNTREVFAQVKQMYKTPTLKYFGGFNFSQILPDPLKPTKRSFIEDLLFNKVTLADAGFMKQYGECLGDINARDLICAQKFNGLTVLPPLLTVDMIAAYTAALVSGTATAGWTFGAGAALQIPFAMQMAYRFNGIGVTQNVLYENQKQIANQFNKAISQIQESLTTTSTALGKLQDVVNQNAQALNTLVKQLSSNFGAISSVLNDILSRLDKVEAEVQIDRLITGRLQSLQTYVTQQLIRAAEIRASANLAATKMSECVLGQSKRVGFCGKGYHLMSFPQAAPHGVVFLHVTYVPSQERNFTTAPAICHEGKAYFPREGVFVFNGTSWFITQRNFFSPQIITTDNTFVSGNCDVVIGIINNTVYDPLQPELDSFKEELDKYFKNHTSPDVDLGDISGINASVVNIQKEIDRLNEVAKNLNESLIDLQELGKYEQYIKWPWYVWLGFIAGLIAIVIVTILLCCMTSCCSCLKGACSCGSCCKFDEDDSEPVLKGVKLHYT

SEQ ID NO: 134 - protein, 1255 aa, Unknown
  SARS coronavirus CS21 Spike glycoprotein
MFIFLLFLTLTSGSDLDRCTTFDDVQAPNYTQHTSSMRGVYYPDEIFRSDTLYLTQDLFLPFYSNVTGFHTINHTFGNPVIPFKDGIYFAATEKSNVVRGWVFGSTMNNKSQSVIIINNSTNVVIRACNFELCDNPFFAVSKPMGTQTHTMIFDNAFNCTFEYISDAFSLDVSEKSGNFKHLREFVFKNKDGFLYVYKGYQPIDVVRDLPSGFNTLKPIFKLPLGINITNFRAILTAFSPAQDTWGTSAAAYFVGYLKPTTFMLKYDENGTITDAVDCSQNPLAELKCSVKSFEIDKGIYQTSNFRVVPSGDVVRFPNITNLCPFGEVFNATKFPSVYAWERKKISNCVADYSVLYNSTFFSTFKCYGVSATKLNDLCFSNVYADSFVVKGDDVRQIAPGQTGVIADYNYKLPDDFMGCVLAWNTRNIDATSTGNYNYKYRYLRHGKLRPFERDISNVPFSPDGKPCTPPAPNCYWPLNGYGFYTTSGIGYQPYRVVVLSFELLNAPATVCGPKLSTDLIKNQCVNFNFNGLTGTGVLTPSSKRFQPFQQFGRDVSDFTDSVRDPKTSEILDISPCSFGGVSVITPGTNASSEVAVLYQDVNCTDVSTAIHADQLTPAWRIYSTGNNVFQTQAGCLIGAEHVDTSYECDIPIGAGICASYHTVSLLRSTSQKSIVAYTMSLGADSSIAYSNNTIAIPTNFSISITTEVMPVSMAKTSVDCNMYICGDSTECANLLLQYGSFCTQLNRALSGIAAEQDRNTREVFAQVKQMYKTPTLKYFGGFNFSQILPDPLKPTKRSFIEDLLFNKVTLADAGFMKQYGECLGDINARDLICAQKFNGLTVLPPLLTDDMIAAYTAALVSGTATAGWTFGAGAALQIPFAMQMAYRFNGIGVTQNVLYENQKQIANQFNKAISQIQESLTTTSTALGKLQDVVNQNAQALNTLVKQLSSNFGAISSVLNDILSRLDKVEAEVQIDRLITGRLQSLQTYVTQQLIRAAEIRASANLAATKMSECVLGQSKRVDFCGKGYHLMSFPQAAPHGVVFLHVTYVPSQERNFTTAPAICHEGKAYFPREGVFVFNGTSWFITQRNFFSPQIITTDNTFVSGNCDVVIGIINNTVYDPLQPELDSFKEELDKYFKNHTSPDVDLGDISGINASVVNIQKEIDRLNEVAKNLNESLIDLQELGKYEQYIKWPWYVWLGFIAGLIAIVMVTILLCCMTSCCSCLKGACSCGSCCKFDEDDSEPVLKGVKLHYT

SEQ ID NO: 135 - protein, 1255 aa, Unknown
  SARS coronavirus ES260 Spike glycoprotein
MFIFLLFLTLTSGSDLDRCTTFDDVQAPNYTQHTSSMRGVYYPDEIFRSDTLYLTQDLFLPFYSNVTGFHTINHTFGNPVIPFKDGIYFAATEKSNVVRGWVFGSTMNNKSQSVIIINNSTNVVIRACNFELCDNPFFAVSKPMGTQTHTMIFDNAFNCTFEYISDAFSLDVSEKSGNFKHLREFVFKNKDGFLYVYKGYQPIDVVRDLPSGFNTLKPIFKLPLGINITNFRAILTAFSPAQDIWGTSAAAYFVGYLKPTTFMLKYDENGTITDAVDCSQNPLAELKCSVKSFEIDKGIYQTSNFRVVPSGDVVRFPNITNLCPFGEVFNATKFPSVYAWERKRISNCVADYSVLYNSTSFSTFKCYGVSATKLNDLCFSNVYADSFVVKGDDVRQIAPGQTGVIADYNYKLPDDFMGCVLAWNTRNIDATSTGNYNYKYRYLRHGKLRPFERDISNVPFSPDGKPCTPPAPNCYWPLNGYGFYTTSGIGYQPYRVVVLSFELLNAPATVCGPKLSTDLIKNQCVNFNFNGLTGTGVLTPSSKRFQPFQQFGRDVSDFTDSVRDPKTSEILDISPCSFGGVSVITPGTNASSEVAVLYQDVNCTDVSTAIHADQLTPAWRIYSTGNNVFQTQAGCLIGAEHVDTSYECDIPIGAGICASYHTVSLLRSTSQKSIVAYTMSLGADSSIAYSNNTIAIPTNFSISITTEVMPVSMAKTSVDCNMYICGDSTECANLLLQYGSFCTQLNRALSGIAAEQDRNTREVFAQVKQMYKTPTLKYFGGFNFSQILPDPLKPTKRSFIEDLLFNKVTLADAGFMKQYGECLGDINARDLICAQKFNGLTVLPPLLTDDMIAAYTAALVSGTATAGWTFGAGAALQIPFAMQMAYRFNGIGVTQNVLYENQKQIANQFNKAISQIQESLTTTSTALGKLQDVVNQNAQALNTLVKQLSSNFGAISSVLNDILSRLDKVEAEVQIDRLITGRLQSLQTYVTQQLIRAAEIRASANLAATKMSECVLGQSKRVDFCGKGYHLMSFPQAAPHGVVFLHVTYVPSQERNFTTAPAICHEGKAYFPREGVFVFNGTSWFITQRNFFSPQIITTDNTFVSGNCDVVIGIINNTVYDPLQPELDSFKEELDKYFKNHTSPDVDLGDISGINASVVNIQKEIDRLNEVAKNLNESLIDLQELGKYEQYIKWPWYVWLGFIAGLIAIVMVTILLCCVTSCCSCLKGACSCGSCCKFDEDDSEPVLKGVKLHYT

SEQ ID NO: 136 - protein, 1255 aa, Unknown
  SARS coronavirus CS24 Spike glycoprotein
MFIFLLFLTLTSGSDLDRCTTFDDVQAPNYTQHTSSMRGVYYPDEIFRSDTLYLTQDLFLPFYSNVTGFHTINHTFDNPVIPFKDGIYFAATEKSNVVRGWVFGSTMNNKSQSVIIINNSTNVVIRACNFELCDNPFFAVSKPMGTQTHTMIFDNAFNCTFEYISDAFSLDVSEKSGNFKHLREFVFKNKDGFLYVYKGYQPIDVVRDLPSGFNTLKPIFKLPLGINITNFRAILTAFSPAQDIWGTSAAAYFVGYLKPTTFMLKYDENGTITDAVDCSQNPLAELKCSVKSFEIDKGIYQTSNFRVVPSGDVVRFPNITNLCPFGEVFNATKFPSVYAWERKKISNCVADYSVLYNSTFFSTFKCYGVSATKLNDLCFSNVYADSFVVKGDDVRQIAPGQTGVIADYNYKLPDDFMGCVLAWNTRNIDATSTGNYNYKYRYLRHGKLRPFERDISNVPFSPDGKPCTPPAPNCYWPLNDYGFYTTSGIGYQPYRVVVLSFELLNAPATVCGPKLSTDLIKNQCVNFNFNGLTGTGVLTPSSKRFQPFQQFGRDVSDFTDSVRDPKTSEILDISPCAFGGVSVITPGTNASSEVAVLYQDVNCTDVSTAIHADQLTPAWRIYSTGNNVFQTQAGCLIGAEHVDTSYECDIPIGAGICASYHTVSLLRSTSQKSIVAYTMSLGADSSIAYSNNTIAIPTNFSISITTEVMPVSMAKTSVDCNMYICGDSTECANLLLQYGSFCTQLNRALSGIAAEQDRNTREVFAQVKQMYKTPTLKYFGGFNFSQILPDPLKPTKRSFIEDLLFNKVTLADAGFMKQYGECLGDINARDLICAQKFNGLTVLPPLLTDDMIAAYTAALVSGTATAGWTFGAGAALQIPFAMQMAYRFNGIGVTQNVLYENQKQIANQFNKAISQIQESLTTTSTALGKLQDVVNQNAQALNTLVKQLSSNFGAISSVLNDILSRLDKVEAEVQIDRLITGRLQSLQTYVTQQLIRAAEIRASANLAATKMSECVLGQSKRVDFCGKGYHLMSFPQAAPHGVVFLHVTYVPSQERNFTTAPAICHEGKAYFPREGVFVFNGTSWFITQRNFFSPQIITTDNTFVSGNCDVVIGIINNTVYDPLQPELDSFKEELDKYFKNHTSPDVDLGDISGINASVVNIQKEIDRLNEVAKNLNESLIDLQELGKYEQYIKWPWYVWLGFIAGLIAIVMVTILLCCVTSCCSCLKGACSCGSCCKFDEDDSEPVLKGVKLHYT

SEQ ID NO: 137 - protein, 1255 aa, Unknown
  SARS coronavirus ES191 Spike glycoprotein
MFIFLLFLTLTSGSDLDRCTTFDDVQAPNYTQHTSSMRGVYYPDEIFRSDTLYLTQDLFLPFYSNVTGFHTINHTFDNPVIPFKDGIYFAATEKSNVVRGWVFGSTMNNKSQSVIIINNSTNVVIRACNFELCDNPFFAVSKPMGTQTHTMIFDNAFNCTFEYISDAFSLDVSEKSGNFKHLREFVFKNKDGFLYVYKGYQPIDVVRDLPSGFNTLKPIFKLPLGINITNFRAILTAFSPAQDIWGTSAAAYFVGYLKPTTFMLKYDENGTITDAVDCSQNPLAELKCSVKSFEIDKGIYQTSNFRVVPSGDVVRFPNITNLCPFGEVFNATKFPSVYAWERKRISNCVADYSVLYNSTFFSTFKCYGVSATKLNDLCFSNVYADSFVVKGDDVRQIAPGQTGVIADYNYKLPDDFMGCVLAWNTRNIDATSTGNYNYKYRYLRHGKLRPFERDISNVPFSPDGKPCTPPAPNCYWPLRGYGFYTTSGIGYQPYRVVVLSFELLNAPATVCGPKLSTDLIKNQCVNFNFNGLTGTGVLTPSSKRFQPFQQFGRDVSDFTDSVRDPKTSEILDISPCSFGGVSVITPGTNASSEVAVLYQDVNCTDVSTAIHADQLTPAWRIYSTGNNVFQTQAGCLIGAEHVDTSYECDIPIGAGICASYHTVSLLRSTSQKSIVAYTMSLGADSSIAYSNNTIAIPTNFSIGITTEVMPVSMAKTSVDCNMYICGDSTECANLLLQYGSFCTQLNRALSGIAAEQDRNTREVFAQVKQMYKTPTLKYFGGFNFSQILPDPLKPTKRSFIEDLLFNKVTLADAGFMKQYGECLGDINARDLICAQKFNGLTVLPPLLTDDMIAAYTAALVSGTATAGWTFGAGAALQIPFAMQMAYRFNGIGVTQNVLYENQKQIANQFNKAISQIQESLTTTSTALGKLQDVVNQNAQALNTLVKQLSSNFGAISSVLNDILSRLDKVEAEVQIDRLITGRLQSLQTYVTQQLIRAAEIRASANLAATKMSECVLGQSKRVDFCGKGYHLMSFPQAAPHGVVFLHVTYVPSQERNFTTAPAICHEGKAYFPREGVFVFNGTSWFITQRNFFSPQIITTDNTFVSGNCDVVIGIINNTVYDPLQPELDSFKEELDKYFKNHTSPDVDLGDISGINASVVNIQKEIDRLNEVAKNLNESLIDLQELGKYEQYIKWPWYVWLGFIAGLIAIVMVTILLCCVTSCCSCLKGACSCGSCCKFDEDDSEPVLKGVKLHYT

SEQ ID NO: 138 - protein, 1255 aa, Unknown
  SARS coronavirus WF188 Spike glycoprotein
MFIFLLFLTLTSGSDLDRCTTFDDVQAPNYTQHTSSMRGVYYPDEIFRSDTLYLTQDLFLPFYSNVTGFHTINHTFDNPVIPFKDGIYFAATEKSNVVRGWVFGSTMNNKSQSVIIINNSTNVVIRACNFELCDNPFFAVSKPMGTQTHTMIFDNAFNCTFEYISDAFSLDVSEKSGNFKHLREFVFKNKDGFPYVYKGYQPIDVVRDLPSGFNTLKPIFKLPLGINITNFRAILTAFSPAQDTWGTSAAAYFVGYLKPTTFMLKYDENGTITDAVDCSQNPLAELKCSVKSFKIDKGIYQTSNFRVVPSGDVVRFPNITNLCPFGEVFNATKFPSVYAWERKRISNCVADYSVLYNSTFFSTFKCYGVSATKLNDLCFSNVYADSFVVKGDDVRQIAPGQTGVIADYNYKLPDDFMGCVLAWNTRNIDATSTGNYNYKYRYLRHGKLRPFERDISNVPFSPDGKPCTPPAPNCYWPLRGYGFYTTSGIGYQPYRVVVLSFELLNAPATVCGPKLSTDLIKNQCVNFNFNGLTGTGVLTPSSKRFQPFQQFGRDVSDFTDSVRDPKTSEILDISPCSFGGVSVITPGTNASSEVAVLYQDVNCTDVSTAIHADQLTPAWRIYSTGNNVFQTQAGCLIGAEHVDTSYECDTPIGAGICASYHTVSSLRSTSQKSIVAYTMSLGADSSIAYSNNTIAIPTNFSISITTEVMPVSMAKTSVDCNMYICGDSTECANLLLQYGSFCTQLNRALSGIAAEQDRNTREVFAQVKQMYKTPTLKYFGGFNFSQILPDPLKPTKRSFIEDLLFNKVTLADAGFMKQYGECLGDINARDLICAQKFNGLTVLPPLLTDDMIAAYTAALVSGTATAGWTFGAGAALQIPFAMQMAYRFNGIGVTQNVLYENQKQIANQFNKAISQIQESLTTTSTALGKLQDVVNQNAQALNTLVKQLSSNFGAISSVLNDILSRLDKVEAEVQIDRLITGRLQSLQTYVTQQLIRAAEIRASANLAATKMSECVLGQSKRVDFCGKGYHLMSFPQAAPHGVVFLHVTYVPSQERNFTTAPAICHEGKAYFPREGVFVFNGTSWFITQRNFFSPQIITTDNTFVSGNCDVVIGIINNTVYDPLQPELDSFKEELDKYFKNHTSPDVDLGDISGINASVVNIQKEIDRLNEVAKNLNESLIDLQELGKYEQYIKWPWYVWLGFIAGLIAIVMVTILLCCVTSCCSCLKGACSCGSCCKFDEDDSEPVLKGVKLHYT

SEQ ID NO: 139 - protein, 1255 aa, Unknown
  SARS coronavirus PC4-137 Spike glycoprotein
MFIFLLFLTLTSGSDLDRCTTFDDVQAPNYTQHTSSMRGVYYPDEIFRSDTLYLTQDLFLPFYSNVTGFHTINHTFDNPVIPFKDGIYFAATEKSNVVRGWVFGSTMNNKSQSVIIINNSTNVVIRACNFELCDNPFFVVSKPMGTRTHTMIFDNAFNCTFEYISDAFSLDVSEKSGNFKHLREFVFKNKDGFLYVYKGYQPIDVVRDLPSGFNTLKPIFKLPLGINITNFRAILTAFSPAQDTWGTSAAAYFVGYLKPTTFMLKYDENGTITDAVDCSQNPLAELKCSVKSFEIDKGIYQTSNFRVVPSGDVVRFPNITNLCPFGEVFNATKFPSVYAWERKRISNCVADYSVLYNSTSFSTFKCYGVSATKLNDLCFSNVYADSFVVKGDDVRQIAPGQTGVIADYNYKLPDDFMGCVLAWNTRNIDATSTGNYNYKYRYLRHGKLRPFERDISNVPFSPDGKPCTPPAPNCYWPLKGYGFYTTSGIGYQPYRVVVLSFELLNAPATVCGPKLSTDLIKNQCVNFNFNGLTGTGVLTPSSKRFQPFQQFGRDVSDFTDSVRDPKTSEILDISPCSFGGVSVITPGTNASSEVAVLYQDVNCTDVSTLIHADQLTPAWRIYSTGNNVFQTQAGCLIGAEHVDTSYECDIPIGAGICASYHTVSSLRSTSQKSIVAYTMSLGADSSIAYSNNTIAIPTNFSISITTEVMPVSMAKTSVDCNMYICGDSTECANLLLQYGSFCRQLNRALSGIAAEQDRNTREVFAQVKQMYKTPTLKDFGGFNFSQILPDPLKPTKRSFIEDLLFNKVTLADAGFMKQYGECLGDINARDLICAQKFNGLTVLPPLLTDDMIAAYTAALVSGTATAGWTFGAGAALQIPFAMQMAYRFNGIGVTQNVLYENQKQIANQFNKAISQIQESLTTTSTALGKLQDVVNQNAQALNTLVKQLSSNFGAISSVLNDILSRLDKVEAEVQIDRLITGRLQSLQTYVTQQLIRAAEIRASANLAATKMSECVLGQSKRVDFCGKGYHLMSFPQAAPHGVVFLHVTYVPSQERNFTTAPAICHEGKAYFPREGVFVFNGTSWFITQRNFFSPQIITTDNTFVSGNCDVVIGIINNTVYDPLQPELDSFKEELDKYFKNHTSPDVDLGDISGINASVVNIQEEIDRLNEVAKNLNESLIDLQELGKYEQYIKWPWYVWLGFIAGLIAIVMVTILLCCMTSCCSCLKGACSCGSCCKFDEDDSEPVLKGVKLHYT

SEQ ID NO: 140 - protein, 1255 aa, Unknown
  SARS coronavirus PC4-199 Spike glycoprotein
MFIFLLFLTLTSGSDLDRCTTFDDVQAPNYTQHTSSMRGVYYPDEIFRSDTLYLTQDLFLPFYSNVTGFHTINHTFDNPVIPFKDGIYFAATEKSNVVRGWVFGSTMNNKSQSVIIINNSTNVVIRACNFELCDNPFFVVSKPMGTRTHTMIFDNAFNCTFEYISDAFSLDVSEKSGNFKHLREFVFKNKDGFLYVYKGYQPIDVVRDLPSGFNTLKPIFKLPLGINITNFRAILTAFSPAQDTWGTSAAAYFVGYLKPTTFMLKYDENGTITDAVDCSQNPLAELKCSVKSFEIDKGIYQTSNFRVVPSGDVVRFPNITNLCPFGEVFNATKFPSVYAWERKRISNCVADYSVLYNSTSFSTFKCYGVSATKLNDLCFSNVYADSFVVKGDDVRQIAPGQTGVIADYNYKLPDDFMGCVLAWNTRNIDATSTGNYNYKYRYLRHGKLRPFERDISNVPFSPDGKPCTPPAPNCYWPLRGYGFYTTSGIGYQPYRVVVLSFELLNAPATVCGPKLSTDLIKNQCVNFNFNGLTGTGVLTPSSKRFQPFQQFGRDVSDFTDSVRDPKTSEILDISPCSFGGVSVITPGTNASSEVAVLYQDVNCTDVSTLIHAEQLTPAWRIYSTGNNVFQTQAGCLIGAEHVDTSYECDIPIGAGICASYHTVSSLRSTSQKSIVAYTMSLGADSSIAYSNNTIAIPTNFSISITTEVMPVSMAKTSVDCNMYICGDSTECANLLLQYGSFCRQLNRALSGIAAEQDRNTREVFAQVKQMYKTPTLKDFGGFNFSQILPDPLKPTKRSFIEDLLFNKVTLADAGFMKQYGECLGDINARDLICAQKFNGLTVLPPLLTDDMIAAYTAALVSGTATAGWTFGAGAALQIPFAMQMAYRFNGIGVTQNVLYENQKQIANQFNKAISQIQESLTTTSTALGKLQDVVNQNAQALNTLVKQLSSNFGAISSVLNDILSRLDKVEAEVQIDRLITGRLQSLQTYVTQQLIRAAEIRASANLAATKMSECVLGQSKRVDFCGKGYHLMSFPQAAPHGVVFLHVTYVPSQERNFTTAPAICHEGKAYFPREGVFVFNGTSWFITQRNFFSPQIITTDNTFVSGNCDVVIGIINNTVYDPLQPELDSFKEELDKYFKNHTSPDVDLGDISGINASVVNIQEEIDRLNEVAKNLNESLIDLQELGKYEQYIKWPWYVWLGFIAGLIAIVMVTILLCCMTSCCSCLKGACSCGSCCKFDEDDSEPVLKGVKLHYT

SEQ ID NO: 141 - protein, 1255 aa, Unknown
  SARS coronavirus PC4-241 Spike glycoprotein
MFIFLLFLTLTSGSDLDRCTTFDDVQAPNYTQHTSSMRGVYYPDEIFRSDTLYLTQDLFLPFYSNVTGFHTINHTFDNPVIPFKDGIYFAATEKSNVVRGWVFGSTMNNKSQSVIIINNSTNVVIRACNFELCDNPFFVVSKPMGTRTHTMIFDNAFNCTFEYISDAFSLDVSEKSGNFKHLREFVFKNKDGFLYVYKGYQPIDVVRDLPSGFNTLKPIFKLPLGINITNFRAILTAFSPAQDTWGTSAAAYFVGYLKPTTFMLKYDENGTITDAVDCSQNPLAELKCSVKSFEIDKGIYQTSNFRVVPSGDVVRFPNITNLCPFGEVFNATKFPSVYAWERKRISNCVADYSVLYNSTSFSTFKCYGVSATKLNDLCFSNVYADSFVVKGDDVRQIAPGQTGVIADYNYKLPDDFMGCVLAWNTRNIDATSTGNYNYKYRYLRHGKLRPFERDISNVPFSPDGKPCTPPAPNCYWPLNGYGFYTTSGIGYQPYRVVVLSFELLNAPATVCGPKLSTDLIKNQCVNFNFNGLTGTGVLTPSSKRFQPFQQFGRDVSDFTDSVRDPKTSEILDISPCSFGGVSVITPGTNASSEVAVLYQDVNCTDVSTLIHAEQLTPAWRIYSTGNNVFQTQAGCLIGAEHVDTSYECDIPIGAGICASYHTVSSLRSTSQKSIVAYTMSLGADSSIAYSNNTIAIPTNFSISITTEVMPVSMAKTSVDCNMYICGDSTECANLLLQYGSFCTQLNRALSGIAAEQDRNTREVFVQVKQMYKTPTLKDFGGFNFSQILPDPLKPTKRSFIEDLLFNKVTLADAGFMKQYGECLGDINARDLICAQKFNGLTVLPPLLTDDMIAAYTAALVSGTATAGWTFGAGAALQIPFAMQMAYRFNGIGVTQNVLYENQKQIANQFNKAISQIQESLTTTSTALGKLQDVVNQNAQALNTLVKQLSSNFGAISSVLNDILSRLDKVEAEVQIDRLITGRLQSLQTYVTQQLIRAAEIRASANLAATKMSECVLGQSKRVDFCGKGYHLMSFPQAAPHGVVFLHVTYVPSQERNFTTAPAICHEGKAYFPREGVFVFNGTSWFITQRNFFSPQIITTDNTFVSGNCDVVIGIINNTVYDPLQPELDSFKEELDKYFKNHTSPDVDLGDISGINASVVNIQEEIDRLNEVAKNLNESLIDLQELGKYEQYIKWPWYVWLGFIAGLIAIVMVTILLCCMTSCCSCLKGACSCGSCCKFDEDDSEPVLKGVKLHYT

SEQ ID NO: 142 - protein, 1255 aa, Unknown
  SARS coronavirus PC4-115 Spike glycoprotein
MFIFLLFLTLTSGSDLDRCTTFDDVQAPNYTQHTSSMRGVYYPDEIFRSDTLYLTQDLFLPFYSNVTGFHTINHTFDNPVIPFKDGIYFAATEKSNVVRGWVFGSTMNNKSQSVIIINNSTNVVIRACNFELCDNPFFVVSKPMGTRTHTMIFDNAFNCTFEYISDAFSLDVSEKSGNFKHLREFVFKNKDGFLYVYKGYQPIDVVRDLPSGFNTLKPIFKLPLGINITNFRAILTAFSPAQDTWGTSAAAYFVGYLKPTTFMLKYDENGTITDAVDCSQNPLAELKCSVKSFEIDKGIYQTSNFRVVPSGDVVRFPNITNLCPFGEVFNATKFPSVYAWERKRISNCVADYSVLYNSTSFSTFKCYGVSATKLNDLCFSNVYADSFVVKGDDVRQIAPGQTGVIADYNYKLPDDFMGCVLAWNTRNIDATSTGNYNYKYRYLRHGKLRPFERDISNVPFSPDGKPCTPPAPNCYWPLNGYGFYTTSGIGYQPYRVVVLSFELLNAPATVCGPKLSTDLIKNQCVNFNFNGLTGTGVLTPSSKRFQPFQQFGRDVSDFTDSVRDPKTSEILDISPCSFGGVSVITPGTNASSEVAVLYQDVNCTDVSTLIHAEQLTPAWRIYSTGNNVFQTQAGCLIGAEHVDTSYECDIPIGAGICASYHTVSSLRSTSQKSIVAYTMSLGADSSIAYSNNTIAIPTNFSISITTEVMPVSMAKTSVDCNMYICGDSTECANLLLQYGSFCRQLNRALSGIAAEQDRNTREVFVQVKQMYKTPTLKDFGGFNFSQILPDPLKPTKRSFIEDLLFNKVTLADAGFMKQYGECLGDINARDLICAQKFNGLTVLPPLLTDDMIAAYTAALVSGTATAGWTFGAGAALQIPFAMQMAYRFNGIGVTQNVLYENQKQIANQFNKAISQIQESLTTTSTALGKLQDVVNQNAQALNTLVKQLSSNFGAISSVLNDILSRLDKVEAEVQIDRLITGRLQSLQTYVTQQLIRAAEIRASANLAATKMSECVLGQSKRVDFCGKGYHLMSFPQAAPHGVVFLHVTYVPSQERNFTTAPAICHEGKAYFPREGVFVFNGTSWFITQRNFFSPQIITTDNTFVSGNCDVVIGIINNTVYDPLQPELDSFKEELDKYFKNHTSPDVDLGDISGINASVVNIQEEIDRLNEVAKNLNESLIDLQELGKYEQYIKWPWYVWLGFIAGLIAIVMVTILLCCMTSCCSCLKGACSCGSCCKFDEDDSEPVLKGVKLHYT

SEQ ID NO: 143 - protein, 1255 aa, Unknown
  SARS coronavirus GD03T0013 Spike glycoprotein
MFIFLLFLTLTSGSDLDRCTTFDDVQAPNYTQHTSSMRGVYYPDEIFRSDTLYLTQDLFLPFYSNVTGFHTINHTFDDPVIPFKDGIYFAATEKSNVVRGWVFGSTMNNKSQSVIIINNSTNVVIRACNFELCDNPFFVVSKPMGTRTHTMIFDNAFNCTFEYISDAFSLDVSEKSGNFKHLREFVFKNKDGFLYVYKGYQPIDVVRDLPSGFNTLKPIFKLPLGINITNFRAILTAFSPAQDTWGTSAAAYFVGYLKPTTFMLKYDENGTITDAVDCSQNPLAELKCSVKSFEIDKGIYQTSNFRVVPSGDVVRFPNITNLCPFGEVFNATKFPSVYAWERKRISNCVADYSVLYNSTSFSTFKCYGVSATKLNDLCFSNVYADSFVVKGDDVRQIAPGQTGVIADYNYKLPDDFMGCVLAWNTRNIDATSTGNYNYKYRYLRHGKLRPFERDISNVPFSPDGKPCTPPAPNCYWPLNGYGFYTTSGIGYQPYRVVVLSFELLNAPATVCGPKLSTDLIKNQCVNFNFNGLTGTGVLTPSSKRFQPFQQFGRDVSDFTDSVRDPKTSEILDISPCSFGGVSVITPGTNASSEVAVLYQDVNCTDVSTLIHAEQLTPAWRIYSTGNNVFQTQAGCLIGAEHVDTSYECDIPIGAGICASYHTVSSLRSTSQKSIVAYTMSLGADSSIAYSNNTIAIPTNFSISITTEVMPVSMAKTSVDCNMYICGDSTECANLLLQYGSFCRQLNRALSGIAAEQDRNTREVFVQVKQMYKTPTLKDFGGFNFSQILPDPLKPTKRSFIEDLLFNKVTLADAGFMKQYGECLGDINARDLICAQKFNGLTVLPPLLTDDMIAAYTAALVSGTATAGWTFGAGAALQIPFAMQMAYRFNGIGVTQNVLYENQKQIANQFNKAISQIQESLTTTSTALGKLQDVVNQNAQALNTLVKQLSSNFGAISSVLNDILSRLDKVEAEVQIDRLITGRLQSLQTYVTQQLIRAAEIRASANLAATKMSECVLGQSKRVDFCGKGYHLMSFPQAAPHGVVFLHVTYVPSQERNFTTAPAICHEGKAYFPREGVFVFNGTSWFITQRNFFSPQIITTDNTFVSGNCDVVIGIINNTVYDPLQPELDSFKEELDKYFKNHTSPDVDLGDISGINASVVNIQEEIDRLNEVAKNLNESLIDLQELGKYEQYIKWPWYVWLGFIAGLIAIVMVTILLCCMTSCCSCLKGACSCGSCCKFDEDDSEPVLKGVKLHYT

SEQ ID NO: 144 - protein, 1255 aa, Unknown
  SARS coronavirus B012 Spike glycoprotein
MFIFLLFLTLTSGSDLDRCTTFDDVQAPNYTQHTSSMRGVYYPDEIFRSDTLYLTQDLFLPFYSNVTGFHTINHTFDNPVIPFKDGIYFAATEKSNVVRGWVFGSTMNNKSQSVIIINNSTNVVIRACNFELCDNPFFVVSKPMGTRTHTMIFDNAFNCTFEYISDAFSLDVSEKSGNFKHLREFVFKNKDGFLYVYKGYQPIDVVRDLPSGFNTLKPIFKLPLGINITNFRAILTAFSPAQDTWGTSAAAYFVGYLKPTTFMLKYDENGTITDAVDCSQNPLAELKCSVKSFEIDKGIYQTSNFRVVPSGDVVRFPNITNLCPFGEVFNATKFPSVYAWERKRISNCVADYSVLYNSTSFSTFKCYGVSATKLNDLCFSNVYADSFVVKGDDVRQIAPGQTGVIADYNYKLPDDFMGCVLAWNTRNIDATSTGNYNYKYRYLRHGKLRPFERDISNVPFSPDGKPCTPPAPNCYWPLNGYGFYTTSGIGYQPYRVVVLSFELLNAPATVCGPKLSTDLIKNQCVNFNFNGLTGTGVLTPSSKRFQPFQQFGRDVSDFTDSVRDPKTSEILDISPCSFGGVSVITPGTNASSEVAVLYQDVNCTDVSTLIHAEQLTPAWRIYSTGNNVFQTQAGCLIGAEHVDTSYECDIPIGAGICASYHTVSSLRSTSQKSIVAYTMSLGADSSIAYSNNTIAIPTNFSISITTEVMPVSMAKTSVDCNMYICGDSTECANLLLQYGSFCRQLNRALSGIAAEQDRNTREVFVQVKQMYKTPTLKDFGGFNFSQILPDPLKPTKRSFIEDLLFNKVTLADAGFMKQYGECLGDINARDLICAQKFNALTVLTPLLTDDMIAAYTAALVSGTATAGWTFGAGAALQIPFAMQMAYRFNGIGVTQNVLYENQKQIANQFNKAISQIQESLTTTSTALGKLQDVVNQNAQALNTLVKQLSSNFGAISSVLNDILSRLDKVEAEVQIDRLITGRLQSLQTYVTQQLIRAAEIRASANLAATKMSECVLGQSKRVDFCGKGYHLMSFPQAAPHGVVFLHVTYVPSQERNFTTAPAICHEGKAYFPREGVFVFNGTSWFITQRNFFSPQIITTDNTFVSGNCDVVIGIINNTVYDPLQPELDSFKEELDKYFKNHTSPDVDLGDISGINASVVNIQEEIDRLNEVAKNLNESLIDLQELGKYEQYIKWPWYVWLGFIAGLIAIVMVTILLCCMTSCCSCLKGACSCGSCCKFDEDDSEPVLKGVKLHYT

SEQ ID NO: 145 - protein, 1255 aa, Unknown
  SARS coronavirus civet020 Spike glycoprotein
MFIFLLFLTLTSGSDLDRCTTFDDVQAPNYTQHTSSMRGVYYPDEIFRSDTLYLTQDLFLPFYSNVTGFHTINHTFDNPVIPFKDGIYFAATEKSNVVRGWVFGSTMNNKSQSVIIINNSTNVVIRACNFELCDNPFFVVSKPMGTRTHTMIFDNAFNCTFEYISDAFSLDVSEKSGNFKHLREFVFKNKDGFLYVYKGYQPIDVVRDLPSGFNTLKPIFKLPLGINITNFRAILTAFSPAQDTWGTSAAAYFVGYLKPTTFMLKYDENGTITDAVDCSQNPLAELKCSVKSFEIDKGIYQTSNFRVVPSGDVVRFPNITNLCPFGEVFNATKFPSVYAWERKRISNCVADYSVLYNSTSFSTFKCYGVSATKLNDLCFSNVYADSFVVKGDDVRQIAPGQTGVIADYNYKLPDDFMGCVLAWNTRNIDATSTGNYNYKYRYLRHGKLRPFERDISNVPFSPDGKPCTPPAPNCYWPLRGYGFYTTSGIGYQPYRVVVLSFELLNAPATVCGPKLSTDLIKNQCVNFNFNGLTGTGVLTPSSKRFQPFQQFGRDVSDFTDSVRDPKTSEILDISPCSFGGVSVITPGTNASSEVAVLYQDVNCTDVSTLIHAEQLTPAWRIYSTGNNVFQTQAGCLIGAEHVDTSYECDIPIGAGICASYHTVSSLRSTSQKSIVAYTMSLGADSSIAYSNNTIAIPTNFSISITTEVMPVSMAKTSVDCNMYICGDSTECANLLLQYGSFCRQLNRALSGIAAEQDRNTREVFVQVKQMYKTPTLKDFGGFNFSQILPDPLKPTKRSFIEDLLFNKVTLADAGFMKQYGECLGDINARDLICAQKFNGLTVLPPLLTDDMIAAYTAALVSGTATAGWTFGAGAALQIPFAMQMAYRFNGIGVTQNVLYENQKQIANQFNKAISQIQESLTTTSTALGKLQDVVNQNAQALNTLVKQLSSNFGAISSVLNDILSRLDKVEAEVQIDRLITGRLQSLQTYVTQQLIRAAEIRASANLAATKMSECVLGQSKRVDFCGKGYHLMSFPQAAPHGVVFLHVTYVPSQERNFTTAPAICHEGKAYFPREGVFVFNGTSWFITQRNFFSPQIITTDNTFVSGNCDVVIGIINNTVYDPLQPELDSFKEELDKYFKNHTSPDVDLGDISGINASVVNIQEEIDRLNEVAKNLNESLIDLQELGKYEQYIKWPWYVWLGFIAGLIAIVMVTILLCCMTSCCSCLKGACSCGSCCKFDEDDSEPVLKGVKLHYT

SEQ ID NO: 146 - protein, 1255 aa, Unknown
  SARS coronavirus B033 Spike glycoprotein
MFIFLLFLTLTSGSDLDRCTTFDDVQAPNYTQHTSSMRGVYYPDEIFRSDTLYLTQDLFLPFYSNVTGFHTINHTFDNPVIPFKDGIYFAATEKSNVVRGWVFGSTMNNKSQSVIIINNSTNVVIRACNFELCDNPFFVVSKPMGTRTHTMIFDNAFNCTFEYISDAFSLDVSEKSGNFKHLREFVFKNKDGFLYVYKGYQPIDVVRDLPSGFNTLKPIFKLPLGINITNFRAILTAFSPAQDTWGTSAAAYFVGYLKPTTFMLKYDENGTITDAVDCSQNPLAELKCSVKSFEIDKGIYQTSNFRVVPSGDVVRFPNITNLCPFGEVFNATKFPSVYAWERKRISNCVADYSVLYNSTSFSTFKCYGVSATKLNDLCFSNVYADSFVVKGDDVRQIAPGQTGVIADYNYKLPDDFMGCVLAWNTRNIDATSTGNYNYKHRYLRHGKLRPFERDISNVPFSPDGKPCTPPAPNCYWPLRGYGFYTTSGIGYQPYRVVVLSFELLNAPATVCGPKLSTDLIKNQCVNFNFNGLTGTGVLTPSSKRFQPFQQFGRDVSDFTDSVRDPKTSEILDISPCSFGGVSVITPGTNASSEVAVLYQDVNCTDVSTLIHAEQLTPAWRIYSTGNNVFQTQAGCLIGAEHVDTSYECDIPIGAGICASYHTVSSLRSTSQKSIVAYTMSLGADSSIAYSNNTIAIPTNFSISITTEVMPVSMAKTSVDCNMYICGDSTECANLLLQYGSFCRQLNRALSGIAAEQDRNTREVFVQVKQMYKTPTLKDFGGFNFSQILPDPLKPTKRSFIEDLLFNKVTLADAGFMKQYGECLGDINARDLICAQKFNGLTVLPPLLTDDMIAAYTAALVSGTATAGWTFGAGAALQIPFAMQMAYRFNGIGVTQNVLYENQKQIANQFNKAISQIQESLTTTSTALGKLQDVVNQNAQALNTLVKQLSSNFGAISSVLNDILSRLDKVEAEVQIDRLITGRLQSLQTYVTQQLIRAAEIRASANLAATKMSECVLGQSKRVDFCGKGYHLMSFPQAAPHGVVFLHVTYVPSQERNFTTAPAICHEGKAYFPREGVFVFNGTSWFITQRNFFSPQIITTDNTFVSGNCDVVIGIINNTVYDPLQPELDSFKEELDKYFKNHTSPDVDLGDISGINASVVNIQEEIDRLNEVAKNLNESLIDLQELGKYEQYIKWPWYVWLGFIAGLIAIVMVTILLCCMTSCCSCLKGACSCGSCCKFDEDDSEPVLKGVKLHYT

SEQ ID NO: 147 - protein, 1255 aa, Unknown
  SARS coronavirus PC4-205 Spike glycoprotein
MFIFLLFLTLTSGSDLDRCTTFDDVQAPNYTQHTSSMRGVYYPDEIFRSDTLYLTQDLFLPFYSNVTGFHTINHTFDNPVIPFKDGIYFAATEKSNVVRGWVFGSTMNNKSQTVIIINNSTNVVIRACNFELCDNPFFVVSKPMGTRTHTMIFDNAFNCTFEYISDAFSLDVSEKSGNFKHLREFVFKNKDGFLYVYKGYQPIDVVRDLPSGFNTLKPIFKLPLGINITNFRAILTAFSPAQDTWGTSAAAYFVGYLKPTTFMLKYDENGTITDAVDCSQNPLAELKCSVKSFEIDKGIYQTSNFRVVPSGDVVRFPNITNLCPFGEVFNATKFPSVYAWERKRISNCVADYSVLYNSTSFSTFKCYGVSATKLNDLCFSNVYADSFVVKGDDVRQIAPGQTGVIADYNYKLPDDFMGCVLAWNTRNIDATSTGNYNYKYRYLRHGKLRPFERDISNVPFSPDGKPCTPPAPNCYWPLRGYGFYTTSGIGYQPYRVVVLSFELLNAPATVCGPKLSTDLIKNQCVNFNFNGLTGTGVLTPSSKRFQPFQQFGRDVSDFTDSVRDPKTSEILDISPCSFGGVSVITPGTNASSEVAVLYQDVNCTDVSTLIHAEQLTPAWRIYSTGNNVFQTQAGCLIGAEHVDTSYECDIPIGAGICASYHTVSSLRSTSQKSIVAYTMSLGADSSIAYSNNTIAIPTNFSISITTEVMPVSMAKTSVDCNMYICGDSTECANLLLQYGSFCRQLNRALSGIAAEQDRNTREVFVQVKQMYKTPTLKDFGGFNFSQILPDPLKPTKRSFIEDLLFNKVTLADAGFMKQYGECLGDINARDLICAQKFNGLTVLPPLLTDDMIAAYTAALVSGTATAGWTFGAGAALQIPFAMQMAYRFNGIGVTQNVLYENQKQIANQFNKAISQIQESLTTTSTALGKLQDVVNQNAQALNTLVKQLSSNFGAISSVLNDILSRLDKVEAEVQIDRLITGRLQSLQTYVTQQLIRAAEIRASANLAATKMSECVLGQSKRVDFCGKGYHLMSFPQAAPHGVVFLHVTYVPSQERNFTTAPAICHEGKAYFPREGVFVFNGTSWFITQRNFFSPQIITTDNTFVSGNCDVVIGIINNTVYDPLQPELDSFKEELDKYFKNHTSPDVDLGDISGINASVVNIQEEIDRLNEVAKNLNESLIDLQELGKYEQYIKWPWYVWLGFIAGLIAIVMVTILLCCMTSCCSCLKGACSCGSCCKFDEDDSEPVLKGVKLHYT

SEQ ID NO: 148 - protein, 1255 aa, Unknown
  SARS coronavirus C028 Spike glycoprotein
MFIFLLFLTLTSGSDLDRCTTFDDVQAPNYTQHTSSMRGVYYPDEIFRSDTLYLTQDLFLPFYSNVTGFHTINHTFDNPVIPFKDGIYFAATEKSNVVRGWVFGSTMNNKSQSVIIINNSTNVVIRACNFELCDNPFFVVSKPMGTRTHTMIFDNAFNCTFEYISDAFSLDVSEKSGNFKHLREFVFKNKDGFLYVYKGYQPIDVVRDLPSGFNTLKPIFKLPLGINITNFRAILTAFSPAQDTWGTSAAAYFVGYLKPTTFMLKYDENGTITDAVDCSQNPLAELKCSVKSFEIDKGIYQTSNFRVVPSGDVVRFPNITNLCPFGEVFNATKFPSVYAWERKRISNCVADYSVLYNSTSFSTFKCYGVSATKLNDLCFSNVYADSFVVKGDDVRQIAPGQTGVIADYNYKLPDDFMGCVLAWNTRNIDATSTGNYNYKYRYLRHGKLRPFERDISNVPFSPDGKPCTPPAPNCYWPLRGYGFYTTSGIGYQPYRVVVLSFELLNAPATVCGPKLSTDLIKNQCVNFNFNGLTGTGVLTPSSKRFQPFQQFGRDVSDFTDSVRDPKTSEILDISPCSFGGVSVITPGTNASSEVAVLYQDVNCTDVSTLIHAEQLTPAWRIYSTGNNVFQTLAGCLIGAEHVDTSYDCDIPIGAGICASYHTVSSLRSTSQKSIVAYTMSLGADSSIAYSNNTIAIPTNFSISITTEVMPVSMAKTSVDCNMYICGDSTECANLLLQYGSFCRQLNRALSGIAAEQDRNTREVFVQVKQMYKTPTLKDFGGFNFSQILPDPLKPTKRSFIEDLLFNKVTLADAGFMKQYGECLGDINARDLICAQKFNGLTVLPPLLTDDMIAAYTAALVSGTATAGWTFGAGAALQIPFAMQMAYRFNGIGVTQNVLYENQKQIANQFNKAISQIQESLTTTSTALGKLQDVVNQNAQALNTLVKQLSSNFGAISSVLNDILSRLDKVEAEVQIDRLITGRLQSLQTYVTQQLIRAAEIRASANLAATKMSECVLGQSKRVDFCGKGYHLMSFPQAAPHGVVFLHVTYVPSQERNFTTAPAICHEGKAYFPREGVFVFNGTSWFITQRNFFSPQIITTDNTFVSGNCDVVIGIINNTVYDPLQPELDSFKEELDKYFKNHTSPDVDLGDISGINASVVNIQEEIDRLNEVAKNLNESLIDLQELGKYEQYIKWPWYVWLGFIAGLIAIVMVTILLCCMTSCCSCLKGACSCGSCCKFDEDDSEPVLKGVKLHYT

SEQ ID NO: 149 - protein, 1255 aa, Unknown
  SARS coronavirus A013 Spike glycoprotein
MFIFLLFLTLTSGSDLDRCTTFDDVQAPNYTQHTSSMRGVYYPDEIFRSDTLYLTQDLFLPFYSNVTGFHTINHTFDNPVIPFKDGIYFAATEKSNVVRGWVFGSTMNNKSQSVIIINNSTNVVIRACNFELCDNPFFVVSKPMGTRTHTMIFDNAFNCTFEYISDAFSLDVSEKSGNFKHLREFVFKNKDGFLYVYKGYQPIDVVRDLPSGFNTLKPIFKLPLGINITNFRAILTAFSPAQDTWGTSAAAYFVGYLKPTTFMLKYDENGTITDAVDCSQNPLAELKCSVKSFEIDKGIYQTSNFRVVPSGDVVRFPNITNLCPFGEVFNATKFPSVYAWERKRISNCVADYSVLYNSTSFSTFKCYGVSATKLNDLCFSNVYADSFVVKGDDVRQIAPGQTGVIADYNYKLPDDFMGCVLAWNTRNIDATSTGNYNYKYRYLRHGKLRPFERDISNVPFSPDGKPCTPPAPNCYWPLRGYGFYTTSGIGYQPYRVVVLSFELLNAPATVCGPKLSTDLIKNQCVNFNFNGLTGTGVLTPSSKRFQPFQQFGRDVSDFTDSVRDPKTSEILDISPCSFGGVSVITPGTNASSEVAVLYQDVNCTDVSTLIHAEQLTPAWRIYSTGNNVFQTQAGCLIGAEHVDTSYECDIPIGAGICASYHTVSSLRSTSQKSIVAYTMSLGADSSIAYSNNTIAIPTNFSISITTEVMPVSMAKTSVDCNMYICGDSTECANLLLQYGSFCRQLNRALSGIAAEQDRNTREVFVQVKQMYKTPTLKDFGGFNFSQILPDPLKPTKRSFIEDLLFNKVTLADAGFMKQYGECLGDINARDLICAQKFNGLTVLPPLLTDDMIAAYTAALVSGTATAGWTFGAGAALQIPFAMQMAYRFNGIGVTQNVLYDNQKQIANQFNKAISQIQESLTTTSTALGKLQDVVNQNAQALNTLVKQLSSNFGAISSVLNDILSRLDKVEAEVQIDRLITGRLQSLQTYVTQQLIRAAEIRASANLAATKMSECVLGQSKRVDFCGKGYHLMSFPQAAPHGVVFLHVTYVPSQERNFTTAPAICHEGKAYFPREGVFVFNGTSWFITQRNFFSPQIITTDNTFVSGNCDVVIGIINNTVYDPLQPELDSFKEELDKYFKNHTSPDVDLGDISGINASVVNIQEEIDRLNEVAKNLNESLIDLQELGKYEQYIKWPWYVWLGFIAGLIAIVMVTILLCCMTSCCSCLKGACSCGSCCKFDEDDSEPVLKGVKLHYT

SEQ ID NO: 150 - protein, 1255 aa, Unknown
  SARS coronavirus civet014 Spike glycoprotein
MFIFLLFLTLTSGSDLDRCTTFDDVQAPNYTQHTSSMRGVYYPDEIFRSDTLYLTQDLFLPFYSNVTGFHTINHTFDNPVIPFKDGIYFAATEKSNVVRGWVFGSTMNNKSQSVIIINNSTNVVIRACNFELCDNPFFVVSKPMGTQTHTMIFDNAFNCTFEYISDAFSLDVSEKSGNFKHLREFVFKNKDGFLYVYKGYQPIDVVRDLPSGFNTLKPIFKLPLGINITNFRAILTAFSPAQDTWGTSAAAYFVGYLKPTTFMLKYDENGTITDAVDCSQNPLAELKCSVKSFEIDKGIYQTSNFRVVPSGDVVRFPNITNLCPFGEVFNATKFPSVYAWERKRISNCVADYSVLYNSTSFSTFKCYGVSATKLNDLCFSNVYADSFVVKGDDVRQIAPGQTGVIADYNYKLPDDFMGCVLAWNTRNIDATSTGNYNYKYRYLRHGKLRPFERDISNVPFSPDGKPCTPPAPNCYWPLKGYGFYTTSGIGYQPYRVVVLSFELLNAPATVCGPKLSTDLIKNQCVNFNFNGLTGTGVLTPSSKRFQPFQQFGRDVSDFTDSVRDPKTSEILDISPCSFGGVSVITPGTNASSEVAVLYQDVNCTDVSTLIHAEQLTPAWRIYSTGNNVFQTQAGCLIGAEHVDTSYECDIPIGAGICASYHTVSSLRSTSQKSIVAYTMSLGADSSIAYSNNTIAIPTNFSISITTEVMPVSMAKTSVDCNMYICGDSTECANLLLQYGSFCRQLNRALSGIAAEQDRNTREVFVQVKQMYKTPTLKDFGGFNFSQILPDPLKPTKRSFIEDLLFNKVTLADAGFMKQYGECLGDINARDLICAQKFNGLTVLPPLLTDDMIAAYTAALVSGTATAGWTFGAGAALQIPFAMQMAYRFNGIGVTQNVLYENQKQIANQFNKAISQIQESLTTTSTALGKLQDVVNQNAQALNTLVKQLSSNFGAISSVLNDILSRLDKVEAEVQIDRLITGRLQSLQTYVTQQLIRAAEIRASANLAATKMSECVLGQSKRVDFCGKGYHLMSFPQAAPHGVVFLHVTYVPSQERNFTTAPAICHEGKAYFPREGVFVFNGTSWFITQRNFFSPQIITTDNTFVSGNCDVVIGIINNTVYDPLQPELDSFKEELDKYFKNHTSPDVDLGDISGINASVVNIQEEIDRLNEVAKNLNESLIDLQELGKYEQYIKWPWYVWLGFIAGLIAIVMVTILLCCMTSCCSCLKGACSCGSCCKFDEDDSEPVLKGVKLHYT

SEQ ID NO: 151 - protein, 1255 aa, Unknown
  SARS coronavirus A001 Spike glycoprotein
  misc_feature (440)..(440): Xaa can be any naturally occurring amino acid
  misc_feature (463)..(463): Xaa can be any naturally occurring amino acid
MFIFLLFLTLTSGSDLDRCTTFDDVQAPNYTQHTSSMRGVYYPDEIFRSDTLYLTQDLFLPFYSNVTGFHTINHTFDNPVIPFKDGIYFAATEKSNVVRGWVFGSTMNNKSQSVIIINNSTNVVIRACNFELCDNPFFVVSKPMGTQTHTMIFDNAFNCTFEYISDAFSLDVSEKSGNFKHLREFVFKNKDGFLYVYKGYQPIDVVRDLPSGFNTLKPIFKLPLGINITNFRAILTAFSPAQDTWGTSAAAYFVGYLKPTTFMLKYDENGTITDAVDCSQNPLAELKCSVKSFEIDKGIYQTSNFRVVPSGDVVRFPNITNLCPFGEVFNATKFPSVYAWERKRISNCVADYSVLYNSTSFSTFKCYGVSATKLNDLCFSNVYADSFVVKGDDVRQIAPGQTGVIADYNYKLPDDFMGCVLAWNTRNIDATSTGNYNYKXRYLRHGKLRPFERDISNVPFSPXGKPCTPPAPNCYWPLRGYGFYTTSGIGYQPYRVVVLSFELLNAPATVCGPKLSTDLIKNQCVNFNFNGLTGTGVLTPSSKRFQPFQQFGRDVSDFTDSVRDPKTSEILDISPCSFGGVSVITPGTNASSEVAVLYQDVNCTDVSTLIHAEQLTPAWRIYSTGNNVFQTQAGCLIGAEHVDTSYECDIPIGAGICASYHTVSSLRSTSQKSIVAYTMSLGADSSIAYSNNTIAIPTNFSISITTEVMPVSMAKTSVDCNMYICGDSTECANLLLQYGSFCRQLNRALSGIAAEQDRNTREVFVQVKQMYKTPTLKDFGGFNFSQILPDPLKPTKRSFIEDLLFNKVTLADAGFMKQYGECLGDINARDLICAQKFNGLTVLPPLLTDDMIAAYTAALVSGTATAGWTFGAGAALQIPFAMQMAYRFNGIGVTQNVLYENQKQIANQFNKAISQIQESLTTTSTALGKLQDVVNQNAQALNTLVKQLSSNFGAISSVLNDILSRLDKVEAEVQIDRLITGRLQSLQTYVTQQLIRAAEIRASANLAATKMSECVLGQSKRVDFCGKGYHLMSFPQAAPHGVVFLHVTYVPSQERNFTTAPAICHEGKAYFPREGVFVFNGTSWFITQRNFFSPQIITTDNTFVSGNCDVVIGIINNTVYDPLQPELDSFKEELDKYFKNHTSPDVDLGDISGINASVVNIQEEIDRLNEVAKNLNESLIDLQELGKYEQYIKWPWYVWLGFIAGLIAIVMVTILLCCMTSCCSCLKGACSCGSCCKFDEDDSEPVLKGVKLHYT

SEQ ID NO: 152 - protein, 1255 aa, Unknown
  SARS coronavirus C013 Spike glycoprotein
MFIFLLFLTLTSGSDLDRCTTFDDVQAPNYTQHTSSMRGVYYPDEIFRSDTLYLTQDLFLPFYSNVTGFHTINHTFDNPVIPFKDGIYFAATEKSNVVRGWVFGSTMNNKSQSVIIINNSTNVVIRACNFELCDNPFFVVSKPMGTQTHTMIFDNAFNCTFEYISDAFSLDVSEKSGNFKHLREFVFKNKDGFLYVYKGYQPIDVVRDLPSGFNTLKPIFKLPLGINITNFRAILTAFSPAQDTWGTSAAAYFVGYLKPTTFMLKYDENGTITDAVDCSQNPLAELKCSVKSFEIDKGIYQTSNFRVVPSGDVVRFPNITNLCPFGEVFNATKFPSVYAWERKRISNCVADYSVLYNSTSFSTFKCYGVSATKLNDLCFSNVYADSFVVKGDDVRQIAPGQTGVIADYNYKLPDDFMGCVLAWNTRNIDATSTGNYNYKFRYLRHGKLRPFERDISNVPFSPDGKPCTPPAPNCYWPLRGYGFYTTSGIGYQPYRVVVLSFELLNAPATVCGPKLSTDLIKNQCVNFNFNGLTGTGVLTPSSKRFQPFQQFGRDVSDFTDSVRDPKTSEILDISPCSFGGVSVITPGTNASSEVAVLYQDVNCTDVSTLIHAEQLTPAWRIYSTGNNVFQTQAGCLIGAEHVDTSYECDIPIGAGICASYHTVSSLRSTSQKSIVAYTMSLGADSSIAYSNNTIAIPTNFSISITTEVMPVSMAKTSVDCNMYICGDSTECANLLLQYGSFCRQLNRALSGIAAEQDRNTREVFVQVKQMYKTPTLKDFGGFNFSQILPDPLKPTKRSFIEDLLFNKVTLADAGFMKQYGECLGDINARDLICAQKFNGLTVLPPLLTDDMIAAYTAALVSGTATAGWTFGAGAALQIPFAMQMAYRFNGIGVTQNVLYENQKQIANQFNKAISQIQESLTTTSTALGKLQDVVNQNAQALNTLVKQLSSNFGAISSVLNDILSRLDKVEAEVQIDRLITGRLQSLQTYVTQQLIRAAEIRASANLAATKMSECVLGQSKRVDFCGKGYHLMSFPQAAPHGVVFLHVTYVPSQERNFTTAPAICHEGKAYFPREGVFVFNGTSWFITQRNFFSPQIITTDNTFVSGNCDVVIGIINNTVYDPLQPELDSFKEELDKYFKNHTSPDVDLGDISGINASVVNIQEEIDRLNEVAKNLNESLIDLQELGKYEQYIKWPWYVWLGFIAGLIAIVMVTILLCCMTSCCSCLKGACSCGSCCKFDEDDSEPVLKGVKLHYT

SEQ ID NO: 153 - protein, 1255 aa, Unknown
  SARS coronavirus C029 Spike glycoprotein
MFIFLLFLTLTSGSDLDRCTTFDDVQAPNYTQHTSSMRGVYYPDEIFRSDTLYLTQDLFLPFYSNVTGFHTINHTFDNPVIPFKDGIYFAATEKSNVVRGWVFGSTMDNKSQSVIIINNSTNVVIRACNFELCDNPFFVVSKPMGTQTHTMIFDNAFNCTFEYISDAFSLDVSEKSGNFKHLREFVFKNKDGFLYVYKGYQPIDVVRDLPSGFNTLKPIFKLPLGINITNFRAILTAFSPAQDTWGTSAAAYFVGYLKPTTFMLKYDENGTITDAVDCSQNPLAELKCSVKSFEIDKGIYQTSNFRVVPSGDVVRFPNITNLCPFGEVFNATKFPSVYAWERKRISNCVADYSVLYNSTSFSTFKCYGVSATKLNDLCFSNVYADSFVVKGDDVRQIAPGQTGVIADYNYKLPDDFMGCVLAWNTRNIDATSTGNYNYKYRYLRHGKLRPFERDISNVPFSPDGKPCTPPAPNCYWPLRGYGFYTTSGIGYQPYRVVVLSFELLNAPATVCGPKLSTDLIKNQCVNFNFNGLTGTGVLTPSSKRFQPFQQFGRDVSDFTDSVRDPKTSEILDISPCSFGGVSVITPGTNASSEVAVLYQDVNCTDVSTLIHAEQLTPAWRIYSTGNNVFQTQAGCLIGAEHVDTSYECDIPIGAGICASYHTVSSLRSTSQKSIVAYTMSLGADSSIAYSNNTIAIPTNFSISITTEVMPVSMAKTSVDCNMYICGDSTECANLLLQYGSFCRQLNRALSGIAAEQDRNTREVFVQVKQMYKTPTLKDFGGFNFSQILPDPLKPTKRSFIEDLLFNKVTLADAGFMKQYGECLGDINARDLICAQKFNGLTVLPPLLTDDMIAAYTAALVSGTATAGWTFGAGAALQIPFAMQMAYRFNGIGVTQNVLYENQKQIANQFNKAISQIQESLTTTSTALGKLQDVVNQNAQALNTLVKQLSSNFGAISSVLNDILSRLDKVEAEVQIDRLITGRLQSLQTYVTQQLIRAAEIRASANLAATKMSECVLGQSKRVDFCGKGYHLMSFPQAAPHGVVFLHVTYVPSQERNFTTAPAICHEGKAYFPREGVFVFNGTSWFITQRNFFSPQIITTDNTFVSGNCDVVIGIINNTVYDPLQPELDSFKEELDKYFKNHTSPDVDLGDISGINASVVNIQEEIDRLNEVAKNLNESLIDLQELGKYEQYIKWPWYVWLGFIAGLIAIVMVTILLCCMTSCCSCLKGACSCGSCCKFDEDDSEPVLKGVKLHYT

SEQ ID NO: 154 - protein, 1255 aa, Unknown
  SARS coronavirus civet019 Spike glycoprotein
MFIFLLFLTLTSGSDLDRCTTFDDVQAPNYTQHTSSMRGVYYPDEIFRSDTLYLTQDLFLPFYSNVTGFHTINHTFDNPVIPFKDGIYFAATEKSNVVRGWVFGSTMNNKSQSVIIINNSTNVVIRACNFELCDNPFFVVSKPMGTQTHTMIFDNAFNCTFEYISDAFSLDVSEKSGNFKHLREFVFKNKDGFLYVYKGYQPIDVVRDLPSGFNTLKPIFKLPLGINITNFRAILTAFSPAQDTWGTSAAAYFVGYLKPTTFMLKYDENGTITDAVDCSQNPLAELKCSVKSFEIDKGIYQTSNFRVVPSGDVVRFPNITNLCPFGEVFNATKFPSVYAWERKRISNCVADYSVLYNSTSFSTFKCYGVSATKLNDLCFSNVYADSFVVKGDDVRQIAPGQTGVIADYNYKLPDDFMGCVLAWNTRNIDATSTGNYNYKYRYLRHGKLRPFERDISNVPFSSDGKPCTPPAPNCYWPLRGYGFYTTSGIGYQPYRVVVLSFELLNAPATVCGPKLSTDLIKNQCVNFNFNGLTGTGVLTPSSKRFQPFQQFGRDVSDFTDSVRDPKTSEILDISPCSFGGVSVITPGTNASSEVAVLYQDVNCTDVSTLIHAEQLTPAWRIYSTGNNVFQTQAGCLIGAEHVDTSYECDIPIGAGICASYHTVSSLRSTSQKSIVAYTMSLGADSSIAYSNNTIAIPTNFSISITTEVMPVSMAKTSVDCNMYICGDSTECANLLLQYGSFCRQLNRALSGIAAEQDRNTREVFVQVKQMYKTPTLKDFGGFNFSQILPDPLKPTKRSFIEDLLFNKVTLADAGFMKQYGECLGDINARDLICAQKFNGLTVLPPLLTDDMIAAYTAALVSGTATAGWTFGAGAALQIPFAMQMAYRFNGIGVTQNVLYENQKQIANQFNKAISQIQESLTTTSTALGKLQDVVNQNAQALNTLVKQLSSNFGAISSVLNDILSRLDKVEAEVQIDRLITGRLQSLQTYVTQQLIRAAEIRASANLAATKMSECVLGQSKRVDFCGKGYHLMSFPQAAPHGVVFLHVTYVPSQERNFTTAPAICHEGKAYFPREGVFVFSGTSWFITQRNFFSPQIITTDNTFVSGNCDVVIGIINNTVYDPLQPELDSFKEELDKYFKNHTSPDVDLGDISGINASVVNIQEEIDRLNEVAKNLNESLIDLQELGKYEQYIKWPWYVWLGFIAGLIAIVMVTILLCCMTSCCSCLKGACSCGSCCKFDEDDSEPVLKGVKLHYT

SEQ ID NO: 155 - protein, 1255 aa, Unknown
  SARS coronavirus A021 Spike glycoprotein
MFIFLLFLTLTSGSDLDRCTTFDDVQAPNYTQHTSSMRGVYYPDEIFRSDTLYLTQDLFLPFYSNVTGFHTINHTFDNPVIPFKDGIYFAATEKSNVVRGWVFGSTMNNKSQSVIIINNSTNVVIRACNFELCDNPFFVVSKPMGTQTHTMIFDNAFNCTFEYISDAFSLDVSEKSGNFKHLREFVFKNKDGFLYVYKGYQPIDVVRDLPSGFNTLKPIFKLPLGINITNFRAILTAFSPAQGTWGTSAAAYFVGYLKPTTFMLKYDENGTITDAVDCSQNPLAELKCSVKSFEIDKGIYQTSNFRVVPSGDVVRFPNITNLCPFGEVFNATKFPSVYAWERKRISNCVADYSVLYNSTSFSTFKCYGVSATKLNDLCFSNVYADSFVVKGDDVRQIAPGQTGVIADYNYKLPDDFMGCVLAWNTRNIDATSTGNYNYKYRYLRHGKLRPFERDISNVPFSPDGKPCTPPAPNCYWPLNGYGFYTTSGIGYQPYRVVVLSFELLNAPATVCGPKLSTDLIKNQCVNFNFNGLTGTGVLTPSSKRFQPFQQFGRDVSDFTDSVRDPKTSEILDISPCSFGGVSVITPGTNASSEVAVLYQDVNCTDVSTVIHAEQLTPAWRIYSTGNNVFQTQAGCLIGAEHVDTSYECDIPIGAGICASYHTVSSLRSTSQKSIVAYTMSLGADSSIAYSNNTIAIPTNFSISITTEVMPVSMAKTSVDCNMYICGDSTECANLLLQYGSFCRQLNRALSGIAAEQDRNTREVFVQVKQMYKTPTLKDFGGFNFSQILPDPLKPTKRSFIEDLLFNKVTLADAGFMKQYGECLGDINARDLICAQKFNGLTVLPPLLTDDMIAAYTAALVSGTATAGWTFGAGAALQIPFAMQMAYRFNGIGVTQNVLYENQKQIANQFNKAISQIQESLTTTSTALGKLQDVVNQNAQALNTLVKQLSSNFGAISSVLNDILSRLDKVEAEVQIDRLITGRLQSLQTYVTQQLIRAAEIRASANLAATKMSECVLGQSKRVDFCGKGYHLMSFPQAAPHGVVFLHVTYVPSQERNFTTAPAICHEGKAYFPREGVFVFSGTSWFITQRNFFSPQIITTDNTFVSGNCDVVIGIINNTVYDPLQPELDSFKEELDKYFKNHTSPDVDLGDISGINASVVNIQEEIDRLNEVAKNLNESLIDLQELGKYEQYIKWPWYVWLGFIAGLIAIVMVTILLCCMTSCCSCLKGACSCGSCCKFDEDDSEPVLKGVKLHYT

SEQ ID NO: 156 - protein, 1255 aa, Unknown
  SARS coronavirus C018 Spike glycoprotein
MFIFLLFLTLTSGSDLDRCTTFDDVQAPNYTQHTSSMRGVYYPDEIFRSDTLYLTQDLFLPFYSNVTGFHTINHTFDNPVIPFKDGIYFAATEKSNVVRGWVFGSTMNNKSQSVIIINNSTNVVIRACNFELCDNPFFVVSKPMGTRTHTMIFDNAFNCTFEYISDAFSLDVSEKSGNFKHLREFVFKNKDGFLYVYKGYQPIDVVRDLPSGFNTLKPIFKLPLGINITNFRAILTAFSPAQGTWGTSAAAYFVGYLKPTTFMLKYDENGTITDAVDCSQNPLAELKCSVKSFEIDKGIYQTSNFRVVPSGDVVRFPNITNLCPFGEVFNATKFPSVYAWERKRISNCVADYSVLYNSTSFSTFKCYGVSATKLNDLCFSNVYADSFVVKGDDVRQIAPGQTGVIADYNYKLPDDFMGCVLAWNTRNIDATSTGNYNYKYRYLRHGKLRPFERDISNVPFSPDGKPCTPPAPNCYWPLRGYGFYTTSGIGYQPYRVVVLSFELLNAPATVCGPKLSTDLIKNQCVNFNFNGLTGTGVLTPSSKRFQPFQQFGRDVSDFTDSVRDPKTSEILDISPCSFGGVSVITPGTNASSEVAVLYQDVNCTDVSTLIHAEQLTPAWRIYSTGNNVFQTQAGCLIGAEHVDTSYECDIPIGAGICASYHTVSSLRSTSQKSIVAYTMSLGADSSIAYSNNTIAIPTNFSISITTEVMPVSMAKTSVDCNMYICGDSTECANLLLQYGSFCRQLNRALSGIAAEQDRNTREVFVQVKQMYKTPTLKDFGGFNFSQILPDPLKPTKRSFIEDLLFNKVTLADAGFMKQYGECLGDINARDLICAQKFNGLTVLPPLLTDDMIAAYTAALVSGTATAGWTFGAGAALQIPFAMQMAYRFNGIGVTQNVLYENQKQIANQFNKAISQIQESLTTTSTALGKLQDVVNQNAQALNTLVKQLSSNFGAISSVLNDILSRLDKVEAEVQIDRLITGRLQSLQTYVTQQLIRAAEIRASANLAATKMSECVLGQSKRVDFCGKGYHLMSFPQAAPHGVVFLHVTYVPFQERNFTTAPAICHEGKAYFPREGVFVFNGTSWFITQRNFFSPQIITTDNTFVSGNCDVVIGIINNTVYDPLQPELDSFKEELDKYFKNHTSPDVDLGDISGINASVVNIQEEIDRLNEVAKNLNESLIDLQELGKYEQYIKWPWYVWLGFIAGLIAIVMVTILLCCMTSCCSCLKGACSCGSCCKFDEDDSEPVLKGVKLHYT

SEQ ID NO: 157 - protein, 1255 aa, Unknown
  SARS coronavirus B024 Spike glycoprotein
MFIFLLFLTLTSGSDLDRCTTFDDVQAPNYTQHTSSMRGVYYPDEIFRSDTLYLTQDLFLPFYSNVTGFHTINHTFDNPVIPFKDGIYFAATEKSNVVRGWVFGSTMNNKSQSVIIINNSTNVVIRACNFELCDNPFFVVSKPMGTQTHTMIFDNAFNCTFEYISDAFSLDVSEKSGNFKHLREFVFKNKDGFLYVYKGYQPIDVVRDLPSGFNTLKPIFKLPLGIKITNFRAILTAFSPAQGTWGTSAAAYFVGYLKPTTFMLKYDENGTITDAVDCSQNPLAELKCSVKSFEIDKGIYQTSNFRVVPSGDVVRFPNITNLCPFGEVFNATKFPSVYAWERKRISNCVADYSVLYNSTSFSTFKCYGVSATKLNDLCFSNVYADSFVVKGDDVRQIAPGQTGVIADYNYKLPDDFMGCVLAWNTRNIDATSTGNYNYKYRYLRHGKLRPFERDISNVPFSPDGKPCTPPAPNCYWPLNGYGFYTTSGIGYQPYRVVVLSFELLNAPATVCGPKLSTDLIKNQCVNFNFNGLTGTGVLTPSSKRFQPFQQFGRDVSDFTDSVRDPKTSEILDISPCSFGGVSVITPGTNASSEVAVLYQDVNCTDVSTLIHADQLTPAWRIYSTGNNVFQTQAGCLIGAEHVDTSYECDIPIGAGICASYHTVSSLRSTSQKSIVAYTMSLGADSSIAYSNNTIAIPTNFSISITTEVMPVSMAKTSVDCNMYICGDSTECANLLLQYGSFCRQLNRALSGIAAEQDRNTREVFVQVKQMYKTPTLKDFGGFNFSQILPDPLKPTKRSFIEDLLFNKVTLADAGFMKQYGECLGDINARDLICAQKFNGLTVLPPLLTDDMIAAYTAALVSGTATAGWTFGAGAALQIPFAMQMAYRFNGIGVTQNVLYENQKQIANQFNKAISQIQESLTTTSTALGKLQDVVNQNAQALNTLVKQLSSNFGAISSVLNDILSRLDKVEAEVQIDRLITGRLQSLQTYVTQQLIRAAEIRASANLAATKMSECVLGQSKRVDFCGKGYHLMSFPQAAPHGVVFLHVTYVPFQERNFTTAPAICHEGKAYFPREGVFVFNGTSWFITQRNFFSPQIITTDNTFVSGNCDVVIGIINNTVYDPLQPELDSFKEELDKYFKNHTSPDVDLGDISGINASVVNIQEEIDRLNEVAKNLNESLIDLQELGKYEQYIKWPWYVWLGFIAGLIAIVMVTILLCCMTSCCSCLKGACSCGSCCKFDEDDSEPVLKGVKLHYT

SEQ ID NO: 158 - protein, 1255 aa, Unknown
  SARS coronavirus C025 Spike glycoprotein
MFIFLLFLTLTSGSDLDRCTTFDDVQAPNYTQHTSSMRGVYYPDEIFRSDTLYLTQDLFLPFYSNVTGFHTINHTFDNPVIPFKDGIYFAATEKSNVVRGWVFGSTMNNKSQSVIIINNSTNVVIRACNFELCDNPFFVVSKPMGTQTHTMIFDNAFNCTFEYISDAFSLDVSEKSGNFKHLREFVFKNKDGFLYVYKGYQPIDVVRDLPSGFNTLKPIFKLPLGIKITNFRAILTAFSPAQGTWGTSAAAYFVGYLKPTTFMLKYDENGTITDAVDCSQNPLAELKCSVKSFEIDKGIYQTSNFRVVPSGDVVRFPNITNLCPFGEVFNATKFPSVYAWERKRISNCVADYSVLYNSTSFSTFKCYGVSATKLNDLCFSNVYADSFVVKGDDVRQIAPGQTGVIADYNYKLPDDFMGCVLAWNTRNIDATSTGNYNYKYRYLRHGKLRPFERDISNVPFSPDGKPCTPPAPNCYWPLRGYGFYTTSGIGYQPYRVVVLSFELLNAPATVCGPKLSTDLIKNQCVNFNFNGLTGTGVLTPSSKRFQPFQQFGRDVSDFTDSVRDPKTSEILDISPCSFGGVSVITPGTNASSEVAVLYQDVNCTDVSTLIHAEQLTPAWRIYSTGNNVFQTQAGCLIGAEHVDSSYECDIPIGAGICASYHTVSSLRSTSQKSIVAYTMSLGADSSIAYSNNTIAIPTNFSISITTEVMPVSMAKTSVDCNMYICGDSTECANLLLQYGSFCRQLNRALSGIAAEQDRNTREVFVQVKQMYKTPTLKDFGGFNFSQILPDPLKPTKRSFIEDLLFNKVTLADAGFMKQYGECLGDINARDLICAQKFNGLTVLPPLLTDDMIAAYTAALVSGTATAGWTFGAGAALQIPFAMQMAYRFNGIGVTQNVLYENQKQIANQFNKAISQIQESLTTTSTALGKLQDVVNQNAQALNTLVKQLSSNFGAISSVLNDILSRLDKVEAEVQIDRLITGRLQSLQTYVTQQLIRAAEIRASANLAATKMSECVLGQSKRVDFCGKGYHLMSFPQAAPHGVVFLHVTYVPSQERNFTTAPAICHEGKAYFPREGVFVFNGTSWFITQRNFFSPQIITTDNTFVSGNCDVVIGIINNTVYDPLQPELDSFKEELDKYFKNHTSPDVDLGDISGINASVVNIQEEIDRLNEVAKNLNESLIDLQELGKYEQYIKWPWYVWLGFIAGLIAIVMVTILLCCMTSCCSCLKGACSCGSCCKFDEDDSEPVLKGVKLHYT

SEQ ID NO: 159 - protein, 1255 aa, Unknown
  SARS coronavirus civet010 Spike glycoprotein
MFIFLLFLTLTSGSDLDRCTTFDDVQAPNYTQHTSSMRGVYYPDEIFRSDTLYLTQDLFLPFYSNVTGFHTINHTFDNPVIPFKDGIYFAATEKSNVVRGWVFGSTMNNKSQSVIIINNSTNVVIRACNFELCDNPFFVVSKPMGTQTHTMIFDNAFNCTFEYISDAFSLDVSEKSGNFKHLREFVFKNKDGFLYVYKGYQPIDVVRDLPSGFNTLKPIFKLPLGIKITNFRAILTAFSPAQGTWGTSAAAYFVGYLKPTTFMLKYDENGTITDAVDCSQNPLAELKCSVKSFEIDKGIYQTSNFRVVPSGDVVRFPNITNLCPFGEVFNATKFPSVYAWERKRISNCVADYSVLYNSTSFSTFKCYGVSATKLNDLCFSNVYADSFVVKGDDVRQIAPGQTGVIADYNYKLPDDFMGCVLAWNTRNIDATSTGNYNYKYRYLRHGKLRPFERDISNVPFSSDGKPCTPPAPNCYWPLRGYGFYTTSGIGYQPYRVVVLSFELLNAPATVCGPKLSTDLIKNQCVNFNFNGLTGTGVLTPSSKRFQPFQQFGRDVSDFTDSVRDPKTSEILDISPCSFGGVSVITPGTNASSEVAVLYQDVNCTDVSTLIHAEQLTPAWRIYSTGNNVFQTQAGCLIGAEHVDTSYECDIPIGAGICASYHTVSSLRSTSQKSIVAYTMSLGADSSIAYSNNTIAIPTNFSISITTEVMPVSMAKTSVDCNMYICGDSTECANLLLQYGSFCRQLNRALSGIAAEQDRNTREVFVQVKQMYKTPTLKDFGGFNFSQILPDPLKPTKRSFIEDLLFNKVTLADAGFMKQYGECLGDINARDLICAQKFNGLTVLPPLLTDDMIAAYTAALVSGTATAGWTFGAGAALQIPFAMQMAYRFNGIGVTQNVLYENQKQIANQFNKAISQIQESLTTTSTALGKLQDVVNQNAQALNTLVKQLSSNFGAISSVLNDILSRLDKVEAEVQIDRLITGRLQSLQTYVTQQLIRAAEIRASANLAATKMSECVLGQSKRVDFCGKGYHLMSFPQAAPHGVVFLHVTYVPSQERNFTTAPAICHEGKAYFPREGVFVFNGTSWFITQRNFFSPQIITTDNTFVSGNCDVVIGIINNTVYDPLQPELDSFKEELDKYFKNHTSPDVDLGDISGINASVVNIQEEIDRLNEVAKNLNESLIDLQELGKYEQYIKWPWYVWLGFIAGLIAIVMVTILLCCMTSCCSCLKGACSCGSCCKFDEDDSEPVLKGVKLHYT

SEQ ID NO: 160 - protein, 1255 aa, Unknown
  Civet SARS CoV 007/2004 Spike glycoprotein
MFIFLLFLTLTSGSDLDRCTTFDDVQAPNYTQHTSSMRGVYYPDEIFRSDTLYLTQDLFLPFYSNVTGFHTINHTFDNPVIPFKDGIYFAATEKSNVVRGWVFGSTMNNKSQSVIIINNSTNVVIRACNFELCDNPFFVVSKPMGTQTHTMIFDNAFNCTFEYISDAFSLDVSEKSGNFKHLREFVFKNKDGFLYVYKGYQPIDVVRDLPSGFNTLKPIFKLPLGIKITNFRAILTAFSPAQGTWGTSAAAYFVGYLKPTTFMLKYDENGTITDAVDCSQNPLAELKCSVKSFEIDKGIYQTSNFRVVPSGDVVRFPNITNLCPFGEVFNATKFPSVYAWERKRISNCVADYSVLYNSTSFSTFKCYGVSATKLNDLCFSNVYADSFVVKGDDVRQIAPGQTGVIADYNYKLPDDFMGCVLAWNTRNIDATSTGNYNYKYRYLRHGKLRPFERDISNVPFSSDGKPCTPPAPNCYWPLRGYGFYTTSGIGYQPYRVVVLSFELLNAPATVCGPKLSTDLIKNQCVNFNFNGLTGTGVLTPSSKRFQPFQQFGRDVSDFTDSVRDPKTSEILDISPCSFGGVSVITPGTNASSEVAVLYQDVNCTDVSTLIHAEQLTPAWRIYSTGNNVFQTQAGCLIGAEHVDTSYECDIPIGAGICASYHTVSSLRSTSQKSIVAYTMSLGADSSIAYSNNTIAIPTNFSISITTEVMPVSMAKTSVDCNMYICGDSTECANLLLQYGSFCRQLNRALSGIAAEQDRNTREVFVQVKQMYKTPTLKDFGGFNFSQILPDPLKPTKRSFIEDLLFNKVTLADAGFMKQYGECLGDINARDLICAQKFNGLTVLPPLLTDDMIAAYTAALVSGTATAGWTFGAGAALQIPFAMQMAYRFNGIGVTQNVLYENQKQIANQFNKAISQIQESLTTTSTALGKLQDVVNQNAQALNTLVKQLSSNFGAISSVLNDILSRLDKVEAEVQIDRLITGRLQSLQTYVTQQLIRAAEIRASANLAATKMSECVLGQSKRVDFCGKGYHLMSFPQAAPHGVVFLHVTYVPSQERNFTTAPAICHEGKAYFPREGVFVFSGTSWFITQRNFFSPQIITTDNTFVSGNCDVVIGIINNTVYDPLQPELDSFKEELDKYFKNHTSPDVDLGDISGINASVVNIQEEIDRLNEVAKNLNESLIDLQELGKYEQYIKWPWYVWLGFIAGLIAIVMVTILLCCMTSCCSCLKGACSCGSCCKFDEDDSEPVLKGVKLHYT

SEQ ID NO: 161 - protein, 1255 aa, Unknown
  SARS coronavirus A022 Spike glycoprotein
MFIFLLFLTLTSGSDLDRCTTFDDVQAPNYTQHTSSMRGVYYPDEIFRSDTLYLTQDLFLPFYSNVTGFHTINHTFDNPVIPFKDGIYFAATEKSNVVRGWVFGSTMNNKSQSVIIINNSTNVVIRACNFELCDNPFFVVSKPMGTQTHTMIFDNAFNCTFEYISDAFSLDVSEKSGNFKHLREFVFKNKDGFLYVYKGYQPIDVVRDLPSGFNTLKPIFKLPLGIKITNFRAILTAFSPAQGTWGTSAAAYFVGYLKPTTFMLKYDENGTITDAVDCSQNPLAELKCSVKSFEIDKGIYQTSNFRVVPSGDVVRFPNITNLCPFGEVFNATKFPSVYAWERKRISNCVADYSVLYNSTSFSTFKCYGVSATKLNDLCFSNVYADSFVVKGDDVRQIAPGQTGVIADYNYKLPDDFMGCVLAWNTRNIDATSTGNYNYKYRYLRHGKLRPFERDISNVPFSSDGKPCTPPAPNCYWPLRGYGFYTTSGIGYQPYRVVVLSFELLNAPATVCGPKLSTDLIKNQCVNFNFNGLTGTGVLTPSSKRFQPFQQFGRDVSDFTDSVRDPKTSEILDISPCSFGGVSVITPGTNASSEVAVLYQDVNCTDVSTLIHAEQLTPAWRIYSTGNNVFQTQAGCLIGAEHVDTSYECDIPIGAGICASYHTVSSLRSTSQKSIVAYTMSLGADSSIAYSNNTIAIPTNFSISITTEVMPVSMAKTSVDCNMYICGDSTECANLLLQYGSFCRQLNRALSGIAAEQDRNTREVFVQVKQMYKTPTLKDFGGFNFSQILPDPLKPTKRSFIEDLLFNKVTLADAGFMKQYGQCLGDINARDLICAQKFNGLTVLPPLLTDDMIAAYTAALVSGTATAGWTFGAGAALQIPFAMQMAYRFNGIGVTQNVLYENQKQIANQFNKAISQIQESLTTTSTALGKLQDVVNQNAQALNTLVKQLSSNFGAISSVLNDILSRLDKVEAEVQIDRLITGRLQSLQTYVTQQLIRAAEIRASANLAATKMSECVLGQSKRVDFCGKGYHLMSFPQAAPHGVVFLHVTYVPSQERNFTTAPAICHEGKAYFPREGVFVFSGTSWFITQRNFFSPQIITTDNTFVSGNCDVVIGIINNTVYDPLQPELDSFKEELDKYFKNHTSPDVDLGDISGINASVVNIQEEIDRLNEVAKNLNESLIDLQELGKYEQYIKWPWYVWLGFIAGLIAIVMVTILLCCMTSCCSCLKGACSCGSCCKFDEDDSEPVLKGVKLHYT

SEQ ID NO: 162 - protein, 1255 aa, Unknown
  SARS coronavirus GD01 Spike glycoprotein S
MFIFLLFLTLTSGSDLDRCTTFDDVQAPNYTQHTSSMRGVYYPDEIFRSDTLYLTQDLFLPFYSNVTGFHTINHTFDNPVIPFKDGIYFAATEKSNVVRGWVFGSTMNNKSQSVIIINNSTNVVIRACNFELCDNPFFAVSKPMGTQTHTMIFDNAFNCTFEYISDAFSLDVSEKSGNFKHLREFVFKNKDGFLYVYKGYQPIDVVRDLPSGFNTLKPIFKLPLGINITNFRAILTAFLPAQDTWGTSAAAYFVGYLKPTTFMLKYDENGTITDAVDCSQNPLAELKCSVKSFEIDKGIYQTSNFRVVPSRDVVRFPNITNLCPFGEVFNATKFPSVYAWERKRISNCVADYSVLYNSTFFSTFKCYGVSATKLNDLCFSNVYADSFVVKGDDVRQIAPGQTGVIADYNYKLPDDFMGCVLAWNTRNIDATSTGNYNYKYRYLRHGKLRPFERDISNVPFSPDGKPCTPPALNCYWPLNDYGFYTTTGIGYQPYRVVVLSYELLNAPATVCGPKLSTDLIKNQCVNFNFNGLTGTGVLTPSSKRFQPFQQFGRDVSDFTDSVRDPKTSEILDISPCSFGGVSVITPGTNASSEVAVLYQDVNCTDVSTAIHADQLTPAWRIYSTGNNVFQTQAGCLIGAEHVDTSYECDIPIGAGICASYHTVSLLRSTSQKSIVAYTMSLGADSSIAYSNNTIAIPTNFSISITTEVMPVSMAKTSVDCNMYICGDSTECANLLLQYGSFCTQLNRALSGIAAEQDRNTREVFAQVKQMYKTPTLKDFGGFNFSQILPDPLKSTKRSFIEDLLFNKVTLADAGFMKQYGECLGDINARDLICAQKFNGLTVLPPLLTDDMIAAYTAALVSGTATAGWTFGAGAALQIPFAMQMAYRFNGIGVTQNVLYENQKQIANQFNKAISQIQESLTTTSTALGKLQDVVNQNAQALNTLVKQLSSNFGAISSVLNDILSRLDKVEAEVQIDRLITGRLQSLQTYVTQQLIRAAEIRASANLAATKMSECVLGQSKRVDFCGKGYHLMSFPQAAPHGVVFLHVTYVPSQERNFTTAPAICHEGKAYFPREGVFVFNGTSWFITQRNFFSPQIITTDNTFVSGNCDVVIGIINNTVYDPLQPELDSFKEELDKYFKNHTSPDVDLGDISGINASVVNIQKEIDRLNEVAKNLNESLIDLQELGKYEQYIKWPWYVWLGFIAGLIAIVMVTILLCCMTSCCSCLKGACSCGSCCKFDEDDSEPVLKGVKLHYT

SEQ ID NO: 163 - protein, 1255 aa, Unknown
  SARS coronavirus GZ02 Spike glycoprotein
MFIFLLFLTLTSGSDLDRCTTFDDVQAPNYTQHTSSMRGVYYPDEIFRSDTLYLTQDLFLPFYSNVTGFHTINHTFDNPVIPFKDGIYFAATEKSNVVRGWVFGSTMNNKSQSVIIINNSTNVVIRACNFELCDNPFFAVSKPMGTQTHTMIFDNAFNCTFEYISDAFSLDVSEKSGNFKHLREFVFKNKDGFLYVYKGYQPIDVVRDLPSGFNTLKPIFKLPLGINITNFRAILTAFLPAQDTWGTSAAAYFVGYLKPTTFMLKYDENGTITDAVDCSQNPLAELKCSVKSFEIDKGIYQTSNFRVVPSRDVVRFPNITNLCPFGEVFNATKFPSVYAWERKRISNCVADYSVLYNSTFFSTFKCYGVSATKLNDLCFSNVYADSFVVKGDDVRQIAPGQTGVIADYNYKLPDDFMGCVLAWNTRNIDATSTGNYNYKYRYLRHGKLRPFERDISNVPFSPDGKPCTPPALNCYWPLNDYGFYTTTGIGYQPYRVVVLSFELLNAPATVCGPKLSTDLIKNQCVNFNFNGLTGTGVLTPSSKRFQPFQQFGRDVSDFTDSVRDPKTSEILDISPCSFGGVSVITPGTNASSEVAVLYQDVNCTDVSTAIHADQLTPAWRIYSTGNNVFQTQAGCLIGAEHVDTSYECDIPIGAGICASYHTVSLLRSTSQKSIVAYTMSLGADSSIAYSNNTIAIPTNFSISITTEVMPVSMAKTSVDCNMYICGDSTECANLLLQYGSFCTQLNRALSGIAAEQDRNTREVFAQVKQMYKTPTLKDFGGFNFSQILPDPLKPTKRSFIEDLLFNKVTLADAGFMKQYGECLGDINARDLICAQKFNGLTVLPPLLTDDMIAAYTAALVSGTATAGWTFGAGAALQIPFAMQMAYRFNGIGVTQNVLYENQKQIANQFNKAISQIQESLTTTSTALGKLQDVVNQNAQALNTLVKQLSSNFGAISSVLNDILSRLDKVEAEVQIDRLITGRLQSLQTYVTQQLIRAAEIRASANLAATKMSECVLGQSKRVDFCGKGYHLMSFPQAAPHGVVFLHVTYVPSQERNFTTAPAICHEGKAYFPREGVFVFNGTSWFITQRNFFSPQIITTDNTFVSGNCDVVIGIINNTVYDPLQPELDSFKEELDKYFKNHTSPDVDLGDISGINASVVNIQEEIDRLNEVAKNLNESLIDLQELGKYEQYIKWPWYVWLGFIAGLIAIVMVTILLCCMTSCCSCLKGACSCGSCCKFDEDDSEPVLKGVKLHYT

SEQ ID NO: 164 - protein, 1240 aa, Artificial Sequence
  SARS-CoV spike protein with foldon and linker
MFIFLFFLTLVSGSDLDRCTTFDDVQAPNYTQHTSSMRGVYYPDEIFRSDTLYLTQDLFLPFYSNVTGFHTINHTFDNPVIPFKDGIYFAATEKSNVVRGWVFGSTMNNKSQSVIIINNSTNVVIRACNFELCDNPFFAVSKPMGTQTHTMIFDNAFNCTFEYISDAFSLDVSEKSGNFKHLREFVFKNKDGFLYVYKGYQPIDVVRDLPSGFNTLKPIFKLPLGINITNFRAILTAFSPAQDTWGTSAAAYFVGYLKPTTFMLKYDENGTITDAVDCSQNPLAELKCSVKSFEIDKGIYQTSNFRVVPSGDVVRFPNITNLCPFGEVFNATKFPSVYAWERKKISNCVADYSVLYNSTFFSTFKCYGVSATKLNDLCFSNVYADSFVVKGDDVRQIAPGQTGVIADYNYKLPDDFMGCVLAWNTRNIDATSTGNYNYKYRYLRHGKLRPFERDISNVPFSPDGKPCTPPALNCYWPLNDYGFYTTTGIGYQPYRVVVLSFELLNAPATVCGPKLSTDLIKNQCVNFNFNGLTGTGVLTPSSKRFQPFQQFGRDVSDFTDSVRDPKTSEILDISPCSFGGVSVITPGTNASSEVAVLYQDVNCTDVSTAIHADQLTPAWRIYSTGNNVFQTQAGCLIGAEHVDTSYECDIPIGAGICASYHTVSLLRSTSQKSIVAYTMSLGADSSIAYSNNTIAIPTNFSISITTEVMPVSMAKTSVDCNMYICGDSTECANLLLQYGSFCTQLNRALSGIAAEQDRNTREVFAQVKQMYKTPTLKYFGGFNFSQILPDPLKPTKRSFIEDLLFNKVTLADAGFMKQYGECLGDINARDLICAQKFNGLTVLPPLLTDDMIAAYTAALVSGTATAGWTFGAGAALQIPFAMQMAYRFNGIGVTQNVLYENQKQIANQFNKAISQIQESLTTTSTALGKLQDVVNQNAQALNTLVKQLSSNFGAISSVLNDILSRLDPPEAEVQIDRLITGRLQSLQTYVTQQLIRAAEIRASANLAATKMSECVLGQSKRVDFCGKGYHLMSFPQAAPHGVVFLHVTYVPSQERNFTTAPAICHEGKAYFPREGVFVFNGTSWFITQRNFFSPQIITTDNTFVSGNCDVVIGIINNTVYDPLQPELDSFKEELDKYFKNHTSPDVDLGDISGINASVVNIQKEIDRLNEVAKNLNESLIDLQELGKYEQYIKWPLVPRGSGYIPEAPRDGQAYVRKDGEWVLLSTFLLEHHHHHHHHHH

SEQ ID NO: 165 - protein, 1240 aa, Artificial Sequence
  Artificial Sarbecovirus spike consensus 4 with foldon and linker
MFIFLFFLTLVSGSTIEKCTTFDDVQPPNYTQFLSSHRGVYYPDDIFRSDVLHLTQDHFLPFDSNVTGFITFGLNFDNPIIPFKDGIYFAATEKSNVIRGWVFGSTMNNKSQSVIIMNNSTNVVIRACNFELCDNPFFAVSKPNNTQIPSYIFNNAFNCTFEYVSDDFNLDVGEKPGNFKHLREFVFKNKDGFLYVYSGYQPIDVASGLPSGFNALKPIFKLPLGINITNFRTLLTAFPPRPDYWGTSAAAYFVGYLKPTTFMLKYDENGTITDAVDCSQNPLAELKCSVKSFEIDKGIYQTSNFRVAPSKEVVRFPNITNLCPFGEVFNATTFPSVYAWERKRISNCVADYSVLYNSTSFSTFKCYGVSATKLNDLCFSNVYADSFVVKGDDVRQIAPGQTGVIADYNYKLPDDFMGCVLAWNTRNIDATSTGNYNYKYRSLRHGKLRPFERDISNVPFSPDGKPCTPPAFNCYWPLNDYGFFTTNGIGYQPYRVVVLSFELLNAPATVCGPKLSTDLIKNQCVNFNFNGLTGTGVLTPSSKRFQPFQQFGRDVSDFTDSVRDPKTSEILDISPCSFGGVSVITPGTNTSSEVAVLYQDVNCTDVPVAIHADQLTPAWRVYSTGNNVFQTQAGCLIGAEHVDTSYECDIPIGAGICASYHTVSSLRSTSQKSIVAYTMSLGADSSIAYSNNTIAIPTNFSISITTEVMPVSMAKTSVDCNMYICGDSTECANLLLQYGSFCTQLNRALSGIAVEQDRNTREVFAQVKQMYKTPTLKDFGGFNFSQILPDPLKPTKRSFIEDLLFNKVTLADAGFMKQYGECLGDINARDLICAQKFNGLTVLPPLLTDDMIAAYTAALVSGTATAGWTFGAGAALQIPFAMQMAYRFNGIGVTQNVLYENQKQIANQFNKAISQIQESLTTTSTALGKLQDVVNQNAQALNTLVKQLSSNFGAISSVLNDILSRLDPPEAEVQIDRLITGRLQSLQTYVTQQLIRAAEIRASANLAATKMSECVLGQSKRVDFCGKGYHLMSFPQAAPHGVVFLHVTYVPSQERNFTTAPAICHEGKAYFPREGVFVFNGTSWFITQRNFFSPQIITTDNTFVSGSCDVVIGIINNTVYDPLQPELDSFKEELDKYFKNHTSPDVDLGDISGINASVVNIQKEIDRLNEVAKNLNESLIDLQELGKYEQYIKWPLVPRGSGYIPEAPRDGQAYVRKDGEWVLLSTFLLEHHHHHHHHHH

1. An amino acid construct comprising any one of an amino acid sequence selected from SEQ ID NOs: 10 to 22, 164 and 165, the construct having at least 90% sequence identity to at least two different sarbecovirus Spike proteins, or a fragment thereof.

2. The amino acid construct of claim 1, wherein the at least two different sarbecovirus Spike proteins comprise an amino acid sequence having at least 90% sequence identity to a sarbecovirus Spike protein, or an amino acid sequence having at least 90% sequence identity to a fragment of at least two different sarbecovirus Spike proteins.

3. The amino acid construct of claim 1, wherein the fragment comprises a receptor binding domain fragment of a sarbecovirus Spike protein.

4. The amino acid construct of any one of claims 1-3, wherein the amino acid sequence comprises a sequence set forth in SEQ ID NO: 10.

5. The amino acid construct of any one of claims 1-3, wherein the amino acid sequence comprises a sequence set forth in SEQ ID NO: 11.

6. The amino acid construct of any one of claims 1-3, wherein the amino acid sequence comprises a sequence set forth in SEQ ID NO: 12.

7. The amino acid construct of any one of claims 1-3, wherein the amino acid sequence comprises a sequence set forth in SEQ ID NO: 13.

8. The amino acid construct of any one of claims 1-3, wherein the amino acid sequence comprises a sequence set forth in SEQ ID NO: 14.

9. The amino acid construct of any one of claims 1-3, wherein the amino acid sequence comprises a sequence set forth in SEQ ID NO: 15.

10. The amino acid construct of any one of claims 1-3, wherein the amino acid sequence comprises a sequence set forth in SEQ ID NO: 16.

11. The amino acid construct of any one of claims 1-3, wherein the amino acid sequence comprises a sequence set forth in SEQ ID NO: 17

12. The amino acid construct of any one of claims 1-3, wherein the amino acid sequence comprises a sequence set forth in SEQ ID NO: 18.

13. The amino acid construct of any one of claims 1-3, wherein the amino acid sequence comprises a sequence set forth in SEQ ID NO: 19.

14. The amino acid construct of any one of claims 1-3, wherein the amino acid sequence comprises a sequence set forth in SEQ ID NO: 20.

15. The amino acid construct of any one of claims 1-3, wherein the amino acid sequence comprises a sequence set forth in SEQ ID NO: 21.

16. The amino acid construct of any one of claims 1-3, wherein the amino acid sequence comprises a sequence set forth in SEQ ID NO: 22.

17. The amino acid construct of any one of claims 4-16, wherein the amino acid sequence further comprises a foldon and a linker sequence.

18. The amino acid construct of claim 17, wherein the amino acid sequence comprises sequence set forth in SEQ ID NO: 165.

19. The amino acid construct according to any one of claims 1-18, comprising an oligomeric polypeptide.

20. The amino acid construct of claim 19, wherein the polypeptide is a fusion dimer.

21. A nucleic acid encoding the amino acid construct of any one of claims 1 to 18.

22. The nucleic acid according to claim 21, comprising a messenger ribonucleic acid (mRNA)

23. An immunogenic composition comprising the amino acid construct of any one of claims 1 to 19 or the nucleic acid of claim 21 or claim 22.

24. The immunogenic composition of claim 23, further comprising an adjuvant.

25. The immunogenic composition of claim 24, wherein the adjuvant is a Sigma Adjuvant System (S6533).

26. The immunogenic composition of claim 23, comprising at least two sarbecovirus virus antigen.

27. A viral vector comprising a nucleic acid of claim 21 or 22.

28. The viral vector of claim 27, wherein the vector is selected from a recombinant measles virus vector, a vesicular stomatitis virus (VSV) vector, a vaccinia virus vector or an adenovirus vector.

29. The amino acid construct according to any one of claims 1 to 19 for use in the treatment or prevention of sarbecovirus infections.

30. The immunogenic composition according to any one of claims 23 to 26 for use in the treatment and/or prevention of sarbecovirus infections.

31. The nucleic acid according to claim 21 or 22 for use in the treatment and/or prevention of sarbecovirus infections.

32. The viral vector according to claim 27 or 28 for use in the treatment and/or prevention of sarbecovirus infections.

33. Use of an amino acid construct according to any one of claims 1 to 19 in the manufacture of a medicament for the treatment and/or prevention of sarbecovirus infections.

34. Use of an immunogenic composition according to any one of claims 23 to 26 in the manufacture of a medicament for the treatment and/or prevention of sarbecovirus infections.

35. Use of a nucleic acid according to claim 21 or 22 in the manufacture of a medicament for the treatment and/or prevention of sarbecovirus infections.

36. Use of a viral vector according to claim 27 or 28 in the manufacture of a medicament for the treatment and/or prevention of sarbecovirus infections.

37. A method of treating and/or preventing an infection caused by sarbecovirus comprising administering a vaccine molecule comprising an amino acid construct according to any one of claims 1 to 19, an immunogenic composition according to any one of claims 23 to 26, a nucleic acid of claims 21 to 22, or a viral vector of claims 27 to 28 to a subject.

38. A method of making an amino acid construct for the treatment and/or prevention of sarbecovirus infections, comprising:
a. comparing amino acid sequences from at least two different sarbecovirus spike proteins or fragments thereof;
b. identifying identical amino acid in the sequences from the at least two different sarbecovirus spike proteins or fragments thereof;
c. removing any different amino acids from the sequences of the at least two different sarbecovirus spike proteins or fragments thereof to identify a unique amino acid sequence; and
d. forming the amino construct of the unique amino acid sequence wherein the amino construct has at least 90% sequence identity to the at least two different sarbecovirus Spike proteins, or a fragment thereof.

39. The method of claim 38, further comprising modifying the unique amino acid sequence with a foldon and a linker sequence.

40. The method of claim 38 or 39, further comprising identifying a fragment within the unique amino acid sequence that corresponds to a receptor binding domain of the at least two different sarbecovirus spike proteins to form a unique amino acid fragment sequence; and forming the amino construct of the combined unique amino acid fragment sequence with the unique amino acid sequence.

41. The method of any one of claims 38 to 40, wherein forming the amino construct in step d comprises forming a nucleic acid encoding the amino acid construct able to express the amino acid construct.

42. The method of claim 41, wherein the nucleic acid comprises a messenger ribonucleic acid (mRNA).

43. The method of any one of claims 38 to 42, wherein the amino acid construct or a nucleic acid encoding the amino acid construct able to express the amino acid construct is prepared as an immunogenic composition.

44. The method of claim 43, wherein the immunogenic composition comprises an adjuvant.

45. The method of claim 44, wherein the adjuvant is a Sigma Adjuvant system.

46. The method of claim 41 or 42, wherein the nucleic acid is prepared in a viral vector.

47. The method of claim 46, wherein the vector is selected from a recombinant measles virus vector, a vesicular stomatitis virus (VSV) vector, a vaccinia virus vector or an adenovirus vector.
